(19) United States
(12) Patent Application Publication
(10) Pub. No.: US 2024/0248078 A1
(43) Pub. Date: Jul. 25, 2024

(54) Compositions For and Methods of Evaluating Gap Junction Formation and Function

(71) Applicant: Duke University, Durham, NC (US)

(72) Inventors: Kafui Dzirasa, Durham, NC (US); Elizabeth Ransey, Durham, NC (US)

(21) Appl. No.: 18/564,491

(22) PCT Filed: Jun. 3, 2022
(86) PCT No.: PCT/US22/32087

§ 371 Date: Nov. 27, 2023

Related U.S. Application Data
(60) Provisional application No. 63/197,010, filed on Jun. 4, 2021.

(51) Int. Cl. G01N 33/50

(52) U.S. Cl. CPC G01N 33/5076; G01N 33/5032; G01N 2333/976

(57) ABSTRACT

Disclosed herein are compositions for use in methods of evaluating gap junction formation, methods of interrogating the docking interactions between connexins, and methods of high-throughput quantification of gap junction hemichannel docking.

### CROSS-REFERENCE TO RELATED APPLICATION

[0001] This application claims priority to U.S. Provisional Application No. 63/197,010 filed 4 Jun. 2021, which is incorporated herein in its entirety.

### STATEMENT REGARDING FEDERALLY SPONSORED RESEARCH OR DEVELOPMENT

[0002] This invention was made with government support under R21 EY029451-01 awarded by the National Eye Institute. The government has certain rights in the invention.

### REFERENCE TO THE SEQUENCE LISTING

[0003] The Sequence Listing submitted 3 Jun. 2022 as a text file named “22_2045_WO_Sequence_Listing_ST25”, created on 3 Jun. 2022 and having a size of 684 kilobytes is hereby incorporated by reference pursuant to 37 C.F.R. § 1.52(e)(5).

### BACKGROUND

[0004] Gap junctions are membrane spanning channels that connect the cytoplasm of apposed cells, allowing for the passage of small molecules and ions. Gap junctions (GJs) play critical roles in tissue homeostasis, cellular signaling, and intercellular communication (i.e., ionic and small molecule exchange) (Alexander D B, et al. (2003) Curr Med Chem. 10:2045-2058). GJs are composed of connexin (Cx) proteins, which oligomerize into hexameric hemichannels (Falk M M, et al. (1997) EMBO J. 16:2703-2716; AhmadS, et al. (1999) Biochem J. 339(Pt 2):247-253) and dock with compatible hemichannels on adjacent cells to form intercellular pores (Perkins G A, et al. (1998) J Mol Biol. 277:171-177). Connexins play significant roles in the normal physiology of the tissues in which they are expressed, thus, mutations in any of the Cx genes, can lead to pathological changes—including congenital sensorineural deafness (Lee J R, et al. (2009) Expert Rev Mol Med. 11:e35; Scott C A, et al. (2011) Biochem J. 438:245-254); Charcot-Marie-Tooth disorder (Nelis E, et al. (1999) Human Mutation. 13:11-28), and Oculodentodigital dysplasia (ODDD) (Laird D W. (2014) Febs Letters. 588:1339-1348). Additionally, expression level changes have been associated with epileptic conditions (Jin M M, et al. (2011) Neurosci Bull. 27:389-406; Naus C C, et al. (1991) Exp Neurol 0.111:198-203) and several cancers (Mesnil M. (2002) Biol Cell. 94:493-500).

[0005] Gap junctions are comprised of connexin proteins (e.g., currently 21 isoforms) that assemble into hexameric hemichannels on each cell and selectively dock to hemichannels on adjacent cells.

[0006] The 21-isoform family of human Cxs (Sohl G, et al. (2003) Cell Commun Adhes. 10:173-180; Sohl G, et al. (2004) Cardiovasc Res. 62:228-232) are expressed in virtually every tissue in the body (Saez J C, et al. (2003) Physiol Rev. 83:1359-1400; Goodenough D A, et al. (1996) Annu Rev Biochem. 65:475-50) with distinct but often overlapping distributions (Laird D W. (2006) Biochem J. 394:527-543). Since there is some degree of docking and oligomerization compatibility amongst different isoforms, the diversity of composition and functional features of the resultant GJs is substantial. However, major gaps exist in knowledge of how different isoforms interact with each other within and across different tissues and cell types.

[0007] Thus, there remains an urgent need for direct, high-throughput, accurate, and fast analyses of gap junction formation and function. Consequently, the present disclosure provides compositions for and methods of evaluating gap junction formation, interrogating the docking interactions between connexins, and high-throughput quantification of gap junction hemichannel docking.

### BRIEF DESCRIPTION OF THE FIGURES

[0008] FIG. 1A-FIG. 1B shows Flow Enabled Tracking of Connexosomes in HEK cells. (FETCH). FIG. 1A is a schematic of connexin protein life cycle. Connexin proteins assemble into hexameric hemichannels that localize to the plasma membrane of individual cells. Hemichannels diffuse laterally and dock to hemichannels on the plasma membrane of an apposed cell, forming a functional gap junction. Gap junctions concentrate at gap junction plaques which may be comprised of tens to tens of thousands of gap junctions. Cellular down-regulation of gap junction intercellular communication results in the internalization of central portions of gap junction plaques as double-bi-layer vesicular structures called connexosomes. Connexosomes are comprised of fully-docked gap junctions, thus differential fluorescent labeling of counterpart hemichannels results in dual-labeled connexosomes. Here, the lighter and darker gray tags indicate different colors of fluorescent tags. FIG. 1B is a schematic representing expected results of flow cytometry analysis for different combinations of connexin proteins. Paired connexin hemichannels that successfully dock are expected to elicit a strong flow cytometry phenotype representative of two-color connexosomes generation (double positive cells). Paired connexin hemichannels that fail to dock, do not generate connexosomes and, thus, do not generate a corresponding flow cytometry indicative of double positive cells. Here, hemichannel docking is indicated by the observation of two-color/dual-labeled annual gap junctions.

[0009] FIG. 2A-FIG. 2E shows fluorescence exchange phenotype is mediated by connexin proteins. FIG. 2A is a schematic of FETCH experimental set-up involving the co-plating and incubation of individually transfected cell populations. FIG. 2B shows confocal images of co-plated cytoplasmic-fluor and Cx43-fluor expressing HEK 293FT cells. FIG. 2C shows flow cytometry profiles of co-plated cytoplasmic-FP and Cx43-FP cells. Fluorescence exchange can be observed as the cells that display both fluorescent proteins, despite only expressing one construct (Q2). FIG. 2D shows cells sorted from either side of the double-positive quadrant of the co-plated Cx43-mEmerald/Cx43-mApple sample (i.e., higher expressing in mEmerald, higher expressing in mApple). Insets show internalized vesicular structures of double-positive sorted cells. Dual-labeled structures are consistent with connexosomes.

[0010] FIG. 3A-FIG. 3C shows that FETCH can be used to evaluate homotypic and heterotypic docking of multiple connexin isoforms. FIG. 3A shows FETCH score distributions of known positive and known negative connexin protein combinations. The FETCH score is defined as the proportion of Q2, double-positive cells over all fluorescent cells (Q2/Q1+Q2+Q3). FIG. 3B shows homotypic FETCH scores of all human connexin isoforms. FIG. 3C shows FETCH scores of all paired combinations for Cx26, Cx32, Cx36, Cx43, and Cx45.

[0011] FIG. 4A-FIG. 4E show that FETCH can be used to evaluate docking ability of connexin mutant proteins. FIG. 4A is a schematic representation (left side) and FETCH scores (right side) of 10 Oculodentodigital dysplasia (ODDD)-associated Cx43 mutations (in black text) and 5 random alanine mutations (in gray text). FIG. 4B shows that mutation colors reflect docking (green dots) and non-docking (red dots) as determined by statistical analysis of FETCH scores. FIG. 4C is a schematic of GAP-FRAP (fluorescence recovery after photobleaching). Calcein-AM cell permeant dye is added to confluent cells transiently transfected with Cx43-WT and Cx43-mutant constructs. Upon permeating cells, calcein-AM is cleaved by intracellular esterases, making it cell-impermeant; residual dye is removed via repetitive washes. Individual cells containing calcein are bleached using a 488 nm laser, and the recovery of cellular fluorescence over time, mediated by gap junctions, is recorded. FIG. 4D shows the GAP-FRAP analysis of ODDD-associated and random Cx43 mutant proteins. Bar graph depicts maximum fluorescence recovery reached at the end of the recovery time interval (4 mins). Inset shows full initial, bleach and recovery traces for each protein, in addition to corresponding 95% confidence intervals. Mutation colors are carried over from the associated FETCH analysis for each mutation as docking (green bars and traces) and non-docking (red bars and traces); Cx43-WT and Cx43-WT+Inhibitor (100 μM carbenoxolone) are depicted as black. FIG. 4E shows that FETCH scores correlate with FRAP-determined functionality.

[0012] FIG. 5A-FIG. 5B shows that FETCH can evaluate connexin mutations that confer new docking features. FIG. 5A is a schematic of a chimeric connexin construct consisting of Cx43 with the extracellular loops (ELs) of Cx26. FIG. 5B are the flow cytometry plots demonstrating that the Cx43-ELs-Cx26 construct docks with Cx26, but not Cx43.

[0013] FIG. 6 shows summary of FETCH method contribution to the evaluation of connexin protein interactions. Using FETCH docking analysis coupled with a functional assay such as dye transfer can help distinguish incompatible hemichannels and non-functional, docked channels.

[0014] FIG. 7A-FIG. 7B show the expression of Cx43-mEmerald in different cell lines. FIG. 7A shows confocal images of HEK 293FT, HEK 293T, HEK 293, and HeLa cell lines transiently transfected with Cx43-mEmerald with the nuclei stained with DAPI. FIG. 7B shows a western blot of different cell lines transiently transfected with Cx43-mEmerald.

[0015] FIG. 8A-FIG. 8B shows the FETCH analysis pipeline and pilot data for FETCH score distributions. FIG. 8A provides automated gating pipeline that uses sequential kde- and std-based gating approaches to obtain a FETCH score from a single raw .fcs file. FIG. 8B shows FETCH score distributions of known positive and negative combinations used for statistical evaluation. The 95% confidence interval for the known positive and known negative distributions are shown in green and red, respectively.

### BRIEF SUMMARY

[0016] Disclosed herein are connexin proteins. Disclosed herein is a fluorescently-labeled connexin protein. Disclosed herein is a fluorescently-labeled connexin construct.

[0017] Disclosed herein is an isolated nucleic acid molecule comprising a sequence that encodes the sequence set forth in any one of SEQ ID NO:01-SEQ ID NO:21, or a fragment thereof, or a mutant thereof.

[0018] Disclosed herein is an isolated nucleic acid molecule comprising a sequence that encodes the sequence set forth in UniKBProt sequence P17302, Q9Y6H8, P35212, P36382, P48165, P57773, Q969M2, P08034, P29033, O75712, Q9NTQ9, O95377, O95452, Q6PEY0, P36383, Q5T442, Q8NFK1, Q9UKL4, Q8N144, Q96KN9, or A6NN92, or a fragment thereof, or a mutant thereof. Disclosed herein is an isolated nucleic acid molecule comprising a sequence set forth in NCBI Entrez Gene ID #2072, 2697, 2700, 2701, 2703, 2705, 2706, 2707, 2709, 10052, 10804, 57165, 57369, 81025, 84694, 125111, 127534, 219770, 349149, 375519, or 100126572, or a fragment thereof, or a mutant thereof. Disclosed herein is an isolated nucleic acid molecule comprising a sequence corresponding to GJB2, GJA1, GJB6, GJB1, GJB3, GJA5, GJA4, GJA3, GJA8, GJB4, GJC1, GJB5, GJD2, GJC2, GJC3, GJA9, GJA10, GJB7, GJD3, GJD4, or GJE1, or a fragment thereof, or a mutant thereof.

[0019] Disclosed herein is an isolated nucleic acid molecule comprising the sequence set forth in any one of SEQ ID NO:22 to SEQ ID NO:42, or a fragment thereof, or a mutant thereof. Disclosed herein is an isolated nucleic acid molecule comprising any sequence set forth in Table 6. Disclosed herein is an isolated nucleic acid molecule comprising a sequence that encodes the sequence set forth in any one of SEQ ID NO:01-SEQ ID NO:21, or a fragment thereof, or a mutant thereof, and a sequence encoding a tag and/or label.

[0020] Disclosed herein is an isolated nucleic acid molecule comprising a sequence that encodes the sequence set forth in UniKBProt sequence P17302, Q9Y6H8, P35212, P36382, P48165, P57773, Q969M2, P08034, P29033, O75712, Q9NTQ9, O95377, O95452, Q6PEY0, P36383, Q5T442, Q8NFK1, Q9UKL4, Q8N144, Q96KN9, or A6NN92, or a fragment thereof, or a mutant thereof, and a sequence encoding a tag and/or label. Disclosed herein is an isolated nucleic acid molecule comprising a sequence set forth in NCBI Entrez Gene ID #2072, 2697, 2700, 2701, 2703, 2705, 2706, 2707, 2709, 10052, 10804, 57165, 57369, 81025, 84694, 125111, 127534, 219770, 349149, 375519, or 100126572, or a fragment thereof, or a mutant thereof, and a sequence encoding a tag and/or label. Disclosed herein is an isolated nucleic acid molecule comprising a sequence corresponding to GJB2, GJA1, GJB6, GJB1, GJB3, GJA5, GJA4, GJA3, GJA8, GJB4, GJC1, GJB5, GJD2, GJC2, GJC3, GJA9, GJA10, GJB7, GJD3, GJD4, or GJE1, or a fragment thereof, or a mutant thereof, and a sequence encoding a tag and/or label.

[0021] Disclosed herein is an isolated nucleic acid molecule comprising the sequence set forth in any one of SEQ ID NO:22 to SEQ ID NO:42, or a fragment thereof, or a mutant thereof, and a sequence encoding a tag and/or label. Disclosed herein is an isolated nucleic acid molecule comprising a sequence that encodes the sequence set forth in any one of SEQ ID NO:01-SEQ ID NO:21, or a fragment thereof, or a mutant thereof, and a sequence encoding a tag and/or label.

[0022] Disclosed herein is an isolated nucleic acid molecule comprising the sequence set forth in any one of SEQ ID NO:22-SEQ ID NO:42, or a fragment thereof, or a mutant thereof, and a sequence encoding a tag and/or label. Disclosed herein are cells comprising a disclosed isolated nucleic acid molecule or a disclosed plasmid. Disclosed herein are cells transfected by one or more disclosed nucleic acid molecules. Disclosed herein are cells transfected by an isolated nucleic acid molecule comprising a nucleic acid sequence encoding the sequence set forth in any one of SEQ ID NO:01-SEQ ID NO:21, or a fragment thereof, or a mutant thereof.

[0023] Disclosed herein are cells transfected by an isolated nucleic acid molecule comprising a nucleic acid sequence that encodes the sequence set forth in UniKBProt sequence P17302, Q9Y6H8, P35212, P36382, P48165, P57773, Q969M2, P08034, P29033, O75712, Q9NTQ9, O95377, O95452, Q6PEY0, P36383, Q5T442, Q8NFK1, Q9UKL4, Q8N144, Q96KN9, or A6NN92, or a fragment thereof, or a mutant thereof. Disclosed herein are cells transfected by an isolated nucleic acid molecule comprising the nucleic acid sequence set forth in NCBI Entrez Gene ID #2072, 2697, 2700, 2701, 2703, 2705, 2706, 2707, 2709, 10052, 10804, 57165, 57369, 81025, 84694, 125111, 127534, 219770, 349149, 375519, or 100126572, or a fragment thereof, or a mutant thereof. Disclosed herein are cells transfected by an isolated nucleic acid molecule comprising a nucleic acid sequence corresponding to GJB2, GJA1, GJB6, GJB1, GJB3, GJA5, GJA4, GJA3, GJA8, GJB4, GJC1, GJB5, GJD2, GJC2, GJC3, GJA9, GJA10, GJB7, GJD3, GJD4, or GJE1, or a fragment thereof, or a mutant thereof

[0024] Disclosed herein are cells transfected by an isolated nucleic acid molecule comprising the sequence set forth in any one of SEQ ID NO:22 to SEQ ID NO:42, or a fragment thereof, or a mutant thereof

[0025] Disclosed herein is a kit comprising one or more disclosed isolated nucleic acid molecules, one or more disclosed proteins, one or more disclosed cells, or any combination thereof. Disclosed herein is a kit comprising a disclosed connexin protein. Disclosed herein is a kit comprising a disclosed connexin protein comprising a label and/or a tag. Disclosed herein is a kit comprising one or more disclosed cells. Disclosed herein is a kit comprising one or more disclosed compositions and/or components and/or agents that can be used in any disclosed method.

[0026] Disclosed herein is a method of evaluating gap junction formation, the method comprising performing flow enabled tracking of connexosomes in HEK 293FT cells (FETCH). Disclosed herein is a method of interrogating the docking interactions between connexins, the method comprising performing flow enabled tracking of connexosomes in HEK 293FT cells (FETCH).

[0027] Disclosed herein is a method of high throughput quantification of gap junction hemichannel docking, the method comprising performing flow enabled tracking of connexosomes in HEK 293FT cells (FETCH).

### DETAILED DESCRIPTION

[0028] The present disclosure describes formulations, compounded compositions, kits, capsules, containers, and/or methods thereof. It is to be understood that the inventive aspects of which are not limited to specific synthetic methods unless otherwise specified, or to particular reagents unless otherwise specified, as such may, of course, vary. It is also to be understood that the terminology used herein is for the purpose of describing particular aspects only and is not intended to be limiting. Although any methods and materials similar or equivalent to those described herein can be used in the practice or testing of the present invention, example methods and materials are now described.

[0029] All publications mentioned herein are incorporated herein by reference to disclose and describe the methods and/or materials in connection with which the publications are cited. The publications discussed herein are provided solely for their disclosure prior to the filing date of the present application. Nothing herein is to be construed as an admission that the present invention is not entitled to antedate such publication by virtue of prior invention.

### A. Connexins

[0030] Gap junctions are multimeric, transmembrane channels that play crucial roles in tissue homeostasis, cellular signaling, and the propagation of electrical current by enabling direct intercellular communication between adjacent, apposed cells via ionic and small molecule exchange (Alexander D B, et al. (2003) Curr Med Chem. 10:2045-2058)). Gap junctions are composed of connexin (Cx) proteins, which oligomerize into hexameric hemichannels (Falk M M, et al. (1997) EMBO J. 16:2703-2716; Ahmad S, et al. (1999) Biochem J. 339(Pt 2):247-253) and dock with compatible hemichannels of adjacent cells at the plasma membrane to form an intercellular pore connecting the two cells (Perkins G A, et al. (1998) J Mol Biol. 277:171-177). As shown in Table 1, connexins comprise a family of integral membrane proteins consisting of 21 unique isoforms in humans (Sohl G, et al. (2003) Cell Commun Adhes. 10:173-180; Sohl G, et al. (2004) Cardiovasc Res. 62:228-232), with at least one isoform expressed in virtually every tissue and major organ in the body (Goodenough D A, et al. (1996) Annu Rev Biochem. 65:475-502) resulting in distinct and overlapping isoform-specific expression patterns. Routinely, single cell-types simultaneously express two or more connexin isoforms, creating both opportunities for functional redundancy and complex, highly-regulated tissue communication (Laird D W. (2006) Biochem J. 394:527-543).

[0031] Connexins play significant roles in the normal physiology of the tissues in which they are expressed. Thus, mutations in any of the Cx genes can lead to pathological changes. For example, at least 100 mutations of the Connexin26 (Cx26) encoding gene (GJB2) accounts for half of all worldwide cases of congenital sensorineural deafness (Lee J R, et al. (2009) Expert Rev Mol Med. 11:e35; Scott C A, et al. (2011) Biochem J. 438:245-254). Charcot-Marie-Tooth, a motor and sensory neurodegenerative disorder, is associated with mutations of the Connexin32 (Cx32) gene (GJB1) (Nelis E, et al. (1999) Human Mutation. 13:11-28). At least 73 different mutations of the most ubiquitously expressed connexin, Connexin43 (Cx43) gene (GJA1), are associated with Oculodentodigital dysplasia (ODDD) (Laird D W. (2014) Febs Letters. 588:1339-1348), which is a rare, developmental disorder resulting in numerous morphological anomalies and neurological symptoms (De Bock M, et al. (2013) Front Pharmacol. 4:120). Additionally, aberrant expression levels or regulation of Cx43, the primary connexin expressed in the heart, are associated with cardiac arrythmias in the context of myocardial ischemia (Lerner D L, et al. (2000) Circulation. 101:547-552).

[0032] Connexin proteins share a conserved topology consisting of intracellular amino- and carboxy-termini, a cytoplasmic loop, 4 transmembrane (TM) helices, and 2 extracellular loops (ELs). Post-translational modification (e.g., phosphorylation) of the Cx C-terminus regulates transport to and from the plasma membrane (Lampe P D, et al. (2000) Arch Biochem Biophys. 384:205-215) and the N-terminus contributes to channel gating (Lee H J, et al. (2020) Science advances. 6:eaba4996). Motifs in and near the TM domains affect connexin oligomerization and gap junction or hemichannel conductance (Hu X, et al. (2006) Biophysical journal. 90:140-150). The ELs primarily function to impart hemichannel docking specificity (Koval M, et al. (2014) Febs Letters. 588:1193-1204), though EL1 can also contribute to channel properties including permeability and conductance (Oh S, et al. (1999) The J Gen Physiol. 114(3):339-364; Trexler E B, et al. (2000) Biophys J. 79:3036-3051; Bai D L, et al. (2014) Biochem J. 458:1-10). Thus, the primary differentiating features of connexins are trafficking and assembly, oligomerization specificity, docking specificity and permeability or conductance.

[0033] The presence of multiple unique Cx isoforms throughout the body diversifies gap junction intercellular communication. For example, all Cxs form homotypic gap junctions (two hemichannels of one isoform (e.g., Cx36/Cx36 gap junctions) between two neurons (Deans M R, et al. (2002) Neuron. 36:703-712). But most isoforms can also form heterotypic channels; that it, two hemichannels of different isoforms (e.g., Cx46/Cx50 gap junctions in the lens (Lampe P D, et al. (2000) Arch Biochem Biophys. 384:205-215)) with compatibility being dictated by motifs in the ELs. Frequently, because each isoform has slightly variable permeability and conductivity, heterotypic channels exhibit a preferred ionic directional flow (rectification). Additionally, within cells in which more than one Cx is expressed, multiple isoforms may be mixed into single hemichannels, called hetero-oligomerized or heteromeric hemichannels (e.g., cardiac Cx43/Cx45 hemichannels (Martinez A D, et al. (2002) Circ Res. 90:1100-1107), with compatibility dictated by motifs within and adjacent to TM regions (Smith T D, et al. (2012) J Membr Biol. 245(5-6):221-230; Koval M, et al. (2014) Febs Letters. 588:1193-1204).

[0034] Another important feature of gap junction intercellular communication centers on the lifetime of connexin proteins at the plasma membrane being relatively short with half-lives of ˜1-5 hrs (Laird D W, et al. (1991) Biochem J. 273(Pt 1):67-72; Fallon R F, et al. (1981) J Cell Biol. 90:521-526; Laing J G, et al. (1995) J Biol Chem. 270:26399-26403; Beardslee M A, et al. (1998) Circ Res. 83:629-635). Given the critical utility of Cxs throughout the body, this short half-life indicates that Cxs are maintained in a constant flux of biosynthesis and degradation, which allows a cell to rapidly up-regulate or down-regulate gap junction intercellular communication in response to physiological needs. Importantly, once hemichannels dock, they are virtually inseparable under physiological conditions (Ghoshroy S, et al. (1995) J Membr Biol. 146(1):15-28; Goodenough D A, et al. (1974) J Cell Biol. 61:575-590). Thus, down-regulation of gap junction intercellular communication is achieved by functional gap junction internalization. Specifically, gap junctions are turned over from the plasma membrane via a unique clathrin/dynamin-dependent internalization process (Piehl M, et al. (2007) Mol Biol Cell. 18:337-347; Gumpert A M, et al. (2008) FEBS Lett. 582:2887-2892; Nickel B M, et al. (2008) Biochem Biophys Res Commun. 374:679-682) that results in the internalization of portions of or entire gap junction plaques in the form of double-bilayer vesicular structures, termed annular gap junctions or, more recently, connexosomes (Larsen W J, et al. (1979) J Cell Biol. 83(3):576-587; Mazet F, et al. (1985) Circ Res. 56:195-204; Jordan K, et al. (2001) J Cell Sci. 114:763-773). Connexosomes contain fully-docked gap junctions that are either degraded (Piehl M, et al. (2007) Mol Biol Cell. 18:337-347) or recycled and transported back to the plasma membrane (Boassa D, et al. (2010) Traffic. 11:1471-1486; Vanderpuye O A, et al. (2016) Cell Biol Int. 40:387-396; Bell C L, et al. (2019a) Int J Mol Sci. 20(1):44).

TABLE 1
Genetic Disorders Caused by Human Connexin Mutations.

| Gene | Chrom. | Protein | Disorder or Disorders | OMIM |
|---|---|---|---|---|
| GJA1 | 6q22.31 | Cx43 | Craniometaphyseal dysplasia, autosomal recessive | 218400 |
| | | | Erythrokeratodermia variabilis et progressive | 133200 |
| | | | Oculodentodigital dysplasia | 164200 |
| | | | Oculodentodigital dysplasia, autosomal recessive | 257850 |
| | | | Palmoplantar keratoderma with congenital alopecia | 104100 |
| | | | Syndactyly, type III | 186100 |
| GJA3 | 13q12.11 | Cx46 | Cataract | 601885 |
| GJA4 | 1p34.3 | Cx37 | | |
| GJA5 | 1q21.2 | Cx40 | Atrial fibrillation, familial, 11 | 614049 |
| | | | Atrial standstill, digenic (GJA5/SCN5A) | 108770 |
| GJA8 | 1q21.2 | Cx50 | Cataract | 116200 |
| GJA9 | 1p34.3 | Cx59 | | |
| GJA10 | 6q15 | Cx62 | | |
| GJB1 | Xq13.1 | Cx32 | Charcot-Marie-Tooth neuropathy, X-linked 1 | 302800 |
| GJB2 | 13q12.11 | Cx26 | Bart-Pumphrey syndrome | 149200 |
| | | | Deafness, autosomal dominant 3A | 601544 |
| | | | Deafness, autosomal recessive 1A | 220290 |
| | | | Hystrix-like ichthyosis with deafness | 602540 |
| | | | Keratitis-ichthyosis-deafness syndrome | 148210 |
| | | | Keratoderma, palmoplantar, with deafness | 148350 |
| | | | Vohwinkel syndrome | 124500 |
| | | | Porokeratotic eccrine ostial and dermal duct nevus | |
| GJB3 | 1p34.3 | Cx31 | Deafness, autosomal dominant 2B | 612644 |
| | | | Deafness, digenic, (GJB2/GJB3) | 220290 |
| | | | Erythrokeratodermia variabilis et progressiva | 133200 |
| GJB4 | 1p34.3 | Cx30.3 | Erythrokeratodermia variabilis et progressiva | 133200 |
| GJB5 | 1p34.3 | Cx31.1 | | |
| GJB6 | 13q12.11 | Cx30 | Deafness, autosomal dominant 3B | 612643 |
| | | | Deafness, autosomal recessive 1B | 612645 |
| | | | Deafness, digenic (GJB2/GJB6) | 220290 |
| | | | Ectodermal dysplasia 2, Clouston type | 129500 |
| GJB7 | 6q14.3-q15 | Cx25 | | |
| GJC1 | 17q21.31 | Cx45 | | |
| GJC2 | 1q42.13 | Cx47 | Leukodystrophy, hypomyelinating, 2 | 608804 |
| | | | Spastic paraplegia 44, autosomal recessive | 613206 |
| | | | Lymphedema, hereditary, IC | 613480 |
| GJC3 | 7q22.1 | Cx30.2 | | |
| GJD2 | 15q14 | Cx36 | | |
| GJD3 | 17q21.2 | Cx31.9 | | |
| GJD4 | 10p11.21 | Cx40.1 | | |
| GJE1 | 6q24.1 | Cx23 | | |

[0035] Despite the numerous and broad implications of connexin isoforms in human physiology and disease (see Table 1 above), available tools for discerning key attributes such as hemichannel docking and permeability in vitro are currently limited. The most readily available methods for detecting activity (i) often rely on dye transfer (e.g., GAP-FRAP, scrape loading, microinjection, etc.), which in turn depend on the permeability of channels to small molecule dyes such as calcein, carboxyfluorescein, Lucifer yellow, and ethidium bromide, and (ii) use the transfer of these dyes between adjacent cells as indicators of functional gap junctions (Abbaci M, et al. (2008) Biotechniques. 45:33-62). However, very few dyes have been established as gap junction permeant and such dyes are generally connexin isoform, isoform species, and/or pH specific (Elfgang C, et al. (1995) J Cell Biol. 129:805-81). The highest precision and therefore “gold-standard” method for evaluating connexin activity is whole-cell, dual patch clamp measurement (Veenstra R D, et al. (1986) Science. 233:972-974; White T, et al. (1995) Mol Biol Cell. 6(4):459-470), which can quantitatively characterize the electrical coupling (conductance) between two cells mediated by gap junctions with high sensitivity. But this is a very low-throughput, labor intensive, and expensive technique. Thus, what it desperately needed is a higher throughput, universal method for detection/determination of connexin interactions would contribute more comprehensive understanding of connexin biology.

[0036] Here, a fluorescence-based, flow cytometry method for the evaluation of gap junction formation was developed. This method, which is dubbed Flow Cytometry Enabled Tracking of Connexosomes in HEK cells (FETCH), is easy, accessible, fast, and scalable for high-throughput analysis. Specifically, FETCH exploits the generation of fluorescent connexosomes between transfected HEK cell populations expressing distinct connexins. As connexosomes are comprised of docked hemichannels from two different cells, the docking capability of different connexin isoforms or mutant proteins can be evaluated by assessing the presence or absence of formed connexosomes, which is a phenotype that is discernable by flow cytometry (FIG. 1A-FIG. 1B).

### B. Definitions

[0037] Before the present compounds, compositions, articles, systems, devices, and/or methods are disclosed and described, it is to be understood that they are not limited to specific synthetic methods unless otherwise specified, or to particular reagents unless otherwise specified, as such may, of course, vary. It is also to be understood that the terminology used herein is for the purpose of describing particular aspects only and is not intended to be limiting. Although any methods and materials similar or equivalent to those described herein can be used in the practice or testing of the present invention, example methods and materials are now described.

[0038] This disclosure describes inventive concepts with reference to specific examples. However, the intent is to cover all modifications, equivalents, and alternatives of the inventive concepts that are consistent with this disclosure.

[0039] As used in the specification and the appended claims, the singular forms “a”, “an”, and “the” include plural referents unless the context clearly dictates otherwise.

[0040] The phrase “consisting essentially of” limits the scope of a claim to the recited components in a composition or the recited steps in a method as well as those that do not materially affect the basic and novel characteristic or characteristics of the claimed composition or claimed method. The phrase “consisting of” excludes any component, step, or element that is not recited in the claim. The phrase “comprising” is synonymous with “including”, “containing”, or “characterized by”, and is inclusive or open-ended. “Comprising” does not exclude additional, unrecited components or steps.

[0041] As used herein, when referring to any numerical value, the term “about” means a value falling within a range that is ±10% of the stated value.

[0042] Ranges can be expressed herein as from “about” one particular value, and/or to “about” another particular value. When such a range is expressed, a further aspect includes from the one particular value and/or to the other particular value. Similarly, when values are expressed as approximations, by use of the antecedent “about,” it will be understood that the particular value forms a further aspect. It will be further understood that the endpoints of each of the ranges are significant both in relation to the other endpoint and independently of the other endpoint. It is also understood that there are a number of values disclosed herein, and that each value is also herein disclosed as “about” that particular value in addition to the value itself. For example, if the value “10” is disclosed, then “about 10” is also disclosed. It is also understood that each unit between two particular units are also disclosed. For example, if 10 and 15 are disclosed, then 11, 12, 13, and 14 are also disclosed.

[0043] References in the specification and concluding claims to parts by weight of a particular element or component in a composition denotes the weight relationship between the element or component and any other elements or components in the composition or article for which a part by weight is expressed. Thus, in a compound containing 2 parts by weight component X and 5 parts by weight component Y, X and Y are present at a weight ratio of 2:5, and are present in such ratio regardless of whether additional components are contained in the compound.

[0044] As used herein, the terms “optional” or “optionally” means that the subsequently described event or circumstance can or cannot occur, and that the description includes instances where said event or circumstance occurs and instances where it does not. In an aspect, a disclosed method can optionally comprise one or more additional steps, such as, for example, repeating an administering step or altering an administering step.

[0045] As used herein, the term “subject” refers to the target of administration, e.g., a human being. The term “subject” also includes domesticated animals (e.g., cats, dogs, etc.), livestock (e.g., cattle, horses, pigs, sheep, goats, etc.), and laboratory animals (e.g., mouse, rabbit, rat, guinea pig, fruit fly, etc.). Thus, the subject of the herein disclosed methods can be a vertebrate, such as a mammal, a fish, a bird, a reptile, or an amphibian. Alternatively, the subject of the herein disclosed methods can be a human, non-human primate, horse, pig, rabbit, dog, sheep, goat, cow, cat, guinea pig, or rodent. The term does not denote a particular age or sex, and thus, geriatric, adult, adolescent, and child subjects, as well as fetuses, whether male or female, are intended to be covered. In an aspect, a subject can be a human subject. In an aspect, a subject can have a disease or disorder characterized by gap junction dysfunction or misfunction. In an aspect, a subject can be suspected of having a disease or disorder characterized by gap junction dysfunction or misfunction.

[0046] As used herein, the term “diagnosed” means having been subjected to an examination by a person of skill, for example, a physician, and found to have a condition that can be diagnosed or treated by one or more of the disclosed compositions or by one or more of the disclosed methods. For example, “diagnosed with a disease or disorder characterized by gap junction dysfunction and/or malfunction” means having been subjected to an examination by a person of skill, for example, a physician, and found to have a condition that can be treated by one or more of the disclosed compositions or by one or more of the disclosed methods. For example, “suspected of having a disease or disorder characterized by gap junction dysfunction and/or malfunction” can mean having been subjected to an examination by a person of skill, for example, a physician, and found to have a condition that can likely be treated by one or more of the disclosed compositions or by one or more of the disclosed methods. In an aspect, an examination can be physical, can involve various tests (e.g., blood tests, genotyping, biopsies, etc.), diagnostic evaluations (e.g., X-ray, CT scan, etc.), and assays (e.g., enzymatic assay), or a combination thereof. In an aspect, an examination can be objective and/or subjective.

[0047] A “patient” refers can refer to a subject afflicted with a disease or disorder (e.g., gap junction dysfunction and/or malfunction). In an aspect, a patient can be in the military or can be a veteran. In an aspect, a patient can refer to a subject that has been diagnosed with or is suspected of having a disease or disorder characterized by gap junction dysfunction and/or malfunction. In an aspect, a patient can refer to a subject that has been diagnosed with or is suspected of having a disease or disorder and is seeking treatment or receiving treatment for a disease or disorder (such as a disease or disorder characterized by gap junction dysfunction and/or malfunction). In an aspect, a “patient” can refer to a subject afflicted with a disease or disorder characterized by gap junction dysfunction and/or malfunction. In an aspect, a patient can refer to a subject that has been diagnosed with or is suspected of having a disease or disorder a disease or disorder characterized by gap junction dysfunction and/or malfunction. In an aspect, a patient can refer to a subject that has been diagnosed with or is suspected of having a disease or disorder and is seeking treatment or receiving treatment for a disease or disorder (such as a disease or disorder characterized by gap junction dysfunction and/or malfunction).

[0048] As used herein, “codon optimization” can refer to a process of modifying a nucleic acid sequence for enhanced expression in the host cells of interest by replacing one or more codons or more of the native sequence with codons that are more frequently or most frequently used in the genes of that host cell while maintaining the native amino acid sequence. Various species exhibit particular bias for certain codons of a particular amino acid. As contemplated herein, genes can be tailored for optimal gene expression in a given organism based on codon optimization. Codon usage tables are readily available, for example, at the “Codon Usage Database.” Many methods and software tools for codon optimization have been reported previously. (See, for example, genomes.urv.es/OPTIMIZER/).

[0049] As used herein, the phrase “identified to be in need of treatment,” or the like, refers to selection of a subject based upon need for treatment of a disease or disorder characterized by gap junction dysfunction and/or malfunction. For example, a subject can be identified as having a need for treatment based upon an earlier diagnosis by a person of skill and thereafter subjected to treatment for a disease or disorder characterized by gap junction dysfunction and/or malfunction. In an aspect, the identification can be performed by a person different from the person making the diagnosis. In an aspect, the administration can be performed by one who performed the diagnosis.

[0050] As used herein, “inhibit,” “inhibiting”, and “inhibition” mean to diminish or decrease an activity, level, response, condition, severity, disease, or other biological parameter. In an aspect, “inhibiting” can refer to diminishing the intensity, the duration, the amount, or a combination thereof of symptoms, complications, issues due to a subject's gap junction dysfunction and/or malfunction. This can include, but is not limited to, the complete ablation of the activity, level, response, condition, severity, disease, or other biological parameter. This can also include, for example, a 10% inhibition or reduction in the activity, level, response, condition, severity, disease, or other biological parameter as compared to the native or control level (e.g., a subject not having a disease or disorder characterized by gap junction dysfunction and/or malfunction) or to the level prior to the onset of a disease or disorder characterized by gap junction dysfunction and/or malfunction. Thus, in an aspect, the inhibition or reduction can be a 10%, 20%, 30%, 40%, 50%, 60%, 70%, 80%, 90%, 100%, or any amount of reduction in between as compared to native or control levels or to the subject's level prior to the onset of gap junction dysfunction and/or malfunction. In an aspect, the inhibition or reduction can be 10-20%, 20-30%, 30-40%, 40-50%, 50-60%, 60-70%, 70-80%, 80-90%, or 90-100% as compared to native or control levels or to the subject's level prior to the onset of gap junction dysfunction and/or malfunction or a disease or disorder characterized by gap junction dysfunction and/or malfunction. In an aspect, the inhibition or reduction can be 0-25%, 25-50%, 50-75%, or 75-100% as compared to native or control levels or to the subject's level prior to the onset to the onset of gap junction dysfunction and/or malfunction.

[0051] The words “treat” or “treating” or “treatment” include palliative treatment, that is, treatment designed for the relief of symptoms rather than the curing of a disease or disorder characterized by gap junction dysfunction and/or malfunction; preventative treatment, that is, treatment directed to minimizing or partially or completely inhibiting the development of a disease or disorder characterized by gap junction dysfunction and/or malfunction; and supportive treatment, that is, treatment employed to supplement another specific therapy directed toward the improvement of a disease or disorder characterized by gap junction dysfunction and/or malfunction. In an aspect, the terms cover any treatment of a subject, including a mammal (e.g., a human), and includes: (i) preventing the undesired physiological change and/or pathological condition from occurring in a subject that can be predisposed to a disease or disorder characterized by gap junction dysfunction and/or malfunction but has not yet been diagnosed as having it; (ii) inhibiting the physiological change and/or pathological condition (a disease or disorder characterized by gap junction dysfunction and/or malfunction); or (iii) relieving the physiological change and/or pathological condition, i.e., causing regression of a disease or disorder characterized by gap junction dysfunction and/or malfunction. For example, in an aspect, treating a disease or disorder can reduce the severity of an established a disease or disorder in a subject by 1%-100% as compared to a control (such as, for example, an individual not having a disease or disorder characterized by gap junction dysfunction and/or malfunction). In an aspect, treating can refer to a 1%, 2%, 3%, 4%, 5%, 6%, 7%, 8%, 9%, 10%, 20%, 30%, 40%, 50%, 60%, 70%, 80%, 90%, or 100% reduction in the severity of a disease or a disorder or a condition (such as a disease or disorder characterized by gap junction dysfunction and/or malfunction). For example, treating a disease or a disorder can reduce one or more symptoms of a disease or disorder in a subject by 1%-100% as compared to a control (such as, for example, an individual not having a disease or disorder characterized by gap junction dysfunction and/or malfunction). In an aspect, treating can refer to 1%, 2%, 3%, 4%, 5%, 6%, 7%, 8%, 9%, 10%, 20%, 30%, 40%, 50%, 60%, 70%, 80%, 90%, 100% reduction of one or more symptoms of an established a disease or a disorder or a condition (e.g., gap junction dysfunction and/or malfunction). It is understood that treatment does not necessarily refer to a cure or complete ablation or eradication of a disease or disorder characterized by gap junction dysfunction and/or malfunction. However, in an aspect, treatment can refer to a cure or complete ablation or eradication of a disease or a disorder or a condition (such as gap junction dysfunction and/or malfunction).

[0052] As used herein, the term “prevent” or “preventing” or “prevention” refers to precluding, averting, obviating, forestalling, stopping, or hindering something from happening, especially by advance action. It is understood that where reduce, inhibit, or prevent are used herein, unless specifically indicated otherwise, the use of the other two words is also expressly disclosed. In an aspect, preventing gap junction dysfunction and/or malfunction or the worsening of gap junction dysfunction and/or malfunction is intended. The words “prevent” and “preventing” and “prevention” also refer to prophylactic or preventative measures for protecting or precluding a subject (e.g., an individual) not having gap junction dysfunction and/or malfunction or a given gap junction dysfunction and/or malfunction-related complication from progressing to that complication.

[0053] As used herein, the terms “administering” and “administration” refer to any method of providing one or more of the disclosed compositions. Such methods are well-known to those skilled in the art and include, but are not limited to, the following: oral administration, transdermal administration, administration by inhalation, nasal administration, topical administration, in utero administration, intrahepatic administration, intravaginal administration, epidural administration (such as epidural injection), intracerebroventricular (ICV) administration, ophthalmic administration, intraaural administration, depot administration, topical (skin) administration, otic administration, intra-articular (such as joint or vertebrate injection), intracerebral administration, rectal administration, sublingual administration, buccal administration, and parenteral administration, including injectable such as intravenous administration, intra-CSF administration, intra-cistern magna (ICM) administration, intra-arterial administration, intrathecal (ITH) administration, intramuscular administration, and subcutaneous administration. Administration can also include hepatic intra-arterial administration or administration through the hepatic portal vein (HPV). Administration of a disclosed composition, a disclosed pharmaceutical formulation, a disclosed therapeutic agent, a disclosed immune modulator, a disclosed proteasome inhibitor, a disclosed small molecule, a disclosed endonuclease, a disclosed oligonucleotide, and/or a disclosed RNA therapeutic can comprise administration directly into the CNS or the PNS. Administration can be continuous or intermittent. Administration can comprise a combination of one or more route. In an aspect, a disclosed composition, a disclosed pharmaceutical formulation, or any combination thereof can be concurrently and/or serially administered to a subject via multiple routes of administration. For example, in an aspect, administering a disclosed composition, a disclosed pharmaceutical formulation, or any combination thereof can comprise intravenous administration and intra-cistern magna (ICM) administration. In an aspect, administering a disclosed composition, a disclosed pharmaceutical formulation, or any combination thereof can comprise IV administration and intrathecal (ITH) administration. Various combinations of administration are known to the skilled person.

[0054] By “determining the amount” is meant both an absolute quantification of a particular analyte (e.g., fluorescence) or a determination of the relative abundance of a particular analyte (e.g., a dual-labeled connexosome). The phrase includes both direct or indirect measurements of abundance or both.

[0055] As used herein, “modifying the method” can comprise modifying or changing one or more features or aspects of one or more steps of a disclosed method. In an aspect, a method can be altered by changing the amount of one or more of the disclosed compositions used in a disclosed method, or by changing the frequency of administration of one or more disclosed compositions in a disclosed method, by changing the duration of time that one or more disclosed compositions is administered in a disclosed method, or by substituting for one or more of the disclosed components and/or reagents with a similar or equivalent component and/or reagent.

[0056] As used herein, “concurrently” means (1) simultaneously in time, or (2) at different times during a common treatment schedule.

[0057] The term “contacting” as used herein refers to bringing one or more of the disclosed compositions together with a target area or intended target area in such a manner that the disclosed compositions can exert an effect on the intended target or targeted area either directly or indirectly. A target area or intended target area can be one or more cells or one or more connexosome, one or more connexin proteins, one or more disclosed isolated nucleic acid molecules and/or sequences, one or more disclosed cells, or any combination thereof. In an aspect, a target area or intended target area can be any cell or any organ infected by a disease or disorder (such as a cell or organ characterized by gap junction dysfunction and/or malfunction). In an aspect, a target area or intended target area can be any organ, tissue, or cells that are affected by a disease or disorder characterized by gap junction dysfunction and/or malfunction).

[0058] As used herein, “determining” can refer to measuring or ascertaining the presence and severity of a disease or disorder, such as, for example, characterized by gap junction dysfunction and/or malfunction. “Determining” can refer to measuring or ascertaining fluorescence. “Determining” can refer to measuring or ascertaining gap junction formation, or measuring or ascertaining docking interactions between connexins, or measuring or ascertaining gap junction hemichannel docking.

[0059] Methods and techniques used to determine the presence and/or severity of a disease or disorder characterized by gap junction dysfunction and/or malfunction are typically known to the medical arts. For example, the art is familiar with the ways to identify and/or diagnose the presence, severity, or both of a disease or disorder characterized by gap junction dysfunction and/or malfunction. Methods can be based on objective and/or subjective means.

[0060] As used herein, “effective amount” and “amount effective” can refer to an amount that is sufficient to achieve the desired result such as, for example, the treatment and/or prevention of a disease or disorder characterized by gap junction dysfunction and/or malfunction. As used herein, the terms “effective amount” and “amount effective” can refer to an amount that is sufficient to achieve the desired an effect on an undesired condition (e.g., a disease or disorder characterized by gap junction dysfunction and/or malfunction). For example, a “therapeutically effective amount” refers to an amount that is sufficient to achieve the desired therapeutic result or to have an effect on undesired symptoms, but is generally insufficient to cause adverse side effects.

[0061] In an aspect, “therapeutically effective amount” means an amount of the disclosed composition that (i) treats a disease or disorder characterized by gap junction dysfunction and/or malfunction, (ii) attenuates, ameliorates, or eliminates one or more symptoms associated with a disease or disorder characterized by gap junction dysfunction and/or malfunction, or (iii) delays the onset of one or more symptoms of a disease or disorder characterized by gap junction dysfunction and/or malfunction. The specific therapeutically effective dose level for any particular patient will depend upon a variety of factors including the disease or disorder characterized by gap junction dysfunction and/or malfunction being treated; the disclosed compositions employed; the disclosed methods employed; the age, body weight, general health, sex and diet of the patient; the time of administration; the route of administration; the rate of excretion of the disclosed compositions employed; the duration of the treatment; drugs used in combination or coincidental with the disclosed compositions employed, and other like factors well known in the medical arts. For example, it is well within the skill of the art to start doses of the disclosed compositions at levels lower than those required to achieve the desired therapeutic effect and to gradually increase the dosage until the desired effect is achieved. If desired, then the effective daily dose can be divided into multiple doses for purposes of administration. Consequently, a single dose of the disclosed compositions, disclosed pharmaceutical formulations, disclosed therapeutic agents, or a combination thereof can contain such amounts or submultiples thereof to make up the daily dose. The dosage can be adjusted by the individual physician in the event of any contraindications. Dosage can vary, and can be administered in one or more dose administrations daily, for one or several days. Guidance can be found in the literature for appropriate dosages for given classes of pharmaceutical products. In further various aspects, a preparation can be administered in a “prophylactically effective amount”; that is, an amount effective for prevention of a sign or symptom associated with a disease or disorder characterized by gap junction dysfunction and/or malfunction.

[0062] As used herein, the term “package insert” is used to refer to instructions customarily included in commercial packages of therapeutic products, that contain information about the indications, usage, dosage, administration, contraindications and/or warnings concerning the use of such therapeutic products.

[0063] Disclosed are the components to be used to prepare the disclosed compositions, disclosed pharmaceutical formulations, disclosed therapeutic agents, or a combination thereof used within the methods disclosed herein. These and other materials are disclosed herein, and it is understood that when combinations, subsets, interactions, groups, etc. of these materials are disclosed that while specific reference of each various individual and collective combinations and permutation of these compounds cannot be explicitly disclosed, each is specifically contemplated and described herein. For example, if a particular compound is disclosed and discussed and a number of modifications that can be made to a number of molecules including the compounds are discussed, specifically contemplated is each and every combination and permutation of the compound and the modifications that are possible unless specifically indicated to the contrary. Thus, if a class of molecules A, B, and C are disclosed as well as a class of molecules D, E, and F and an example of a combination molecule, A-D is disclosed, then even if each is not individually recited each is individually and collectively contemplated meaning combinations, A-E, A-F, B-D, B-E, B-F, C-D, C-E, and C-F are considered disclosed. Likewise, any subset or combination of these is also disclosed. Thus, for example, the sub-group of A-E, B-F, and C-E would be considered disclosed. This concept applies to all aspects of this application including, but not limited to, steps in methods of making and using the compositions of the invention. Thus, if there are a variety of additional steps that can be performed it is understood that each of these additional steps can be performed with any specific embodiment or combination of embodiments of the methods of the invention.

### C. Compositions for Use in the Disclosed Methods

### 1. Connexin Proteins

[0064] Disclosed herein is a connexin protein. Disclosed herein are connexin proteins.

[0065] In an aspect, a disclosed connexin protein can comprise CX23, CX25, CX26, CX30, CX30.2/CX31.3, CX30.3, CX31, CX31.1, CX31.9/CX30.2, CX32, CX36, CX37, CX40, CX40.1, CX43, CX45, CX46, CX47, CX50, CX59, or CX62, or a fragment thereof.

[0066] In an aspect, a disclosed connexin protein can comprise the sequence set forth in UniProtKB sequence P17302, Q9Y6H8, P35212, P36382, P48165, P57773, Q969M2, P08034, P29033, O75712, Q9NTQ9, O95377, O95452, Q6PEY0, P36383, Q5T442, Q8NFK1, Q9UKL4, Q8N144, Q96KN9, or A6NN92, or a fragment thereof.

[0067] In an aspect, a disclosed connexin protein can comprise the sequence set forth in any one of SEQ ID NO:01-SEQ ID NO:21, or a fragment thereof. In an aspect, a disclosed connexin protein can comprise the sequence set forth in any sequence provided in Table 5.

[0068] In an aspect, a disclosed connexin protein can be encoded by any one of SEQ ID NO:22-SEQ ID NO:42, or a fragment thereof. In an aspect, a disclosed connexin protein can be encoded by any sequence set forth in Table 6.

[0069] Disclosed herein is a connexin protein having one or more mutations. Disclosed herein are connexin proteins having one or more mutations.

[0070] In an aspect, a disclosed connexin protein can comprise CX23, CX25, CX26, CX30, CX30.2/CX31.3, CX30.3, CX31, CX31.1, CX31.9/CX30.2, CX32, CX36, CX37, CX40, CX40.1, CX43, CX45, CX46, CX47, CX50, CX59, or CX62, or a fragment thereof, and which sequence comprises one or more mutations. In an aspect, a disclosed connexin protein can comprise the sequence set forth in UniProtKB sequence P17302, Q9Y6H8, P35212, P36382, P48165, P57773, Q969M2, P08034, P29033, O75712, Q9NTQ9, O95377, O95452, Q6PEY0, P36383, Q5T442, Q8NFK1, Q9UKL4, Q8N144, Q96KN9, or A6NN92, or a fragment thereof and which sequence comprises one or more mutations. In an aspect, a disclosed connexin protein can comprise the sequence set forth in any one of SEQ ID NO:01-SEQ ID NO:21, or a fragment thereof. In an aspect, a disclosed connexin protein can comprise the sequence set forth in any sequence provided in Table 5.

[0071] In an aspect, a disclosed connexin protein can be encoded by any one of SEQ ID NO:22-SEQ ID NO:42, or a fragment thereof and which sequence comprises one or more mutations. In an aspect, a disclosed connexin protein can be encoded by any sequence set forth in Table 6.

[0072] In an aspect, a disclosed connexin protein can comprise one or more mutations. In an aspect, a disclosed mutation can affect a transmembrane helix, an extracellular loop, a cytoplasmic loop, an intracellular amino terminal, or an intracellular carboxy terminal.

[0073] In an aspect, a disclosed connexin protein can comprise a label and/or a tag. In an aspect, a disclosed connexin protein can comprise a fluorescent label and/or a tag. In an aspect, a disclosed connexin protein can comprise a carboxy-terminal label and/or tag or an amino-terminal label and/or tag. In an aspect, a disclosed connexin protein can comprise a carboxy-terminal fluorescent label and/or tag or an amino-terminal fluorescent label and/or tag. In an aspect, a disclosed connexin protein can comprise a fluorescent label or a fluorescent tag. In an aspect, a disclosed fluorescent label or disclosed fluorophore can comprise enhanced green fluorescent protein (EGFP), mEmerald, enhanced yellow fluorescent protein (EYFP), mApple, TdTomato, mCherry, miRFP670, any known fluorescent label or tag, or any combination thereof. In an aspect, a disclosed fluorescent label or disclosed fluorophore can comprise any fluorescent label or fluorophore that is amendable to analysis via flow cytometry. In an aspect, a pair of disclosed fluorescent labels or disclosed fluorophores can comprise any pair of fluorescent labels or fluorophores that is amendable to analysis via flow cytometry and have excitation and emission spectra that can be isolated or separated from each other, thereby enabling the interrogation of the docking interactions. Fluorophores and fluorescent labels are known in the art.

[0074] Disclosed herein is a fluorescently labeled connexin protein. In an aspect, a disclosed connexin protein can comprise a fluorescent label or a fluorescent tag. In an aspect, a disclosed fluorescent label or disclosed fluorophore can comprise enhanced green fluorescent protein (EGFP), mEmerald, enhanced yellow fluorescent protein (EYFP), mApple, TdTomato, mCherry, miRFP670, any known fluorescent label or tag, or any combination thereof. In an aspect, a disclosed fluorescent label or disclosed fluorophore can comprise any fluorescent label or fluorophore that is amendable to analysis via flow cytometry. In an aspect, a pair of disclosed fluorescent labels or disclosed fluorophores can comprise any pair of fluorescent labels or fluorophores that is amendable to analysis via flow cytometry and have excitation and emission spectra that can be isolated or separated from each other, thereby enabling the interrogation of the docking interactions. Fluorophores and fluorescent labels are known in the art.

[0075] Disclosed herein is a fluorescently labeled connexin construct. In an aspect, a disclosed construct can comprise a carboxy-terminal fluorescent label or an amino-terminal tag fluorescent label, or both.

[0076] Disclosed herein are docked hemichannels comprising a first disclosed connexin and a second disclosed connexin. Disclosed herein are docked hemichannels comprising a first labeled connexin and a second labeled connexin. Disclosed herein are hemichannel combinations comprising a first labeled connexin and a second labeled connexin. Disclosed herein is a labeled connexosome comprising a first disclosed connexin and a second disclosed connexin. In an aspect, disclosed hemichannel combinations include the combinations set forth below in Table 2.

TABLE 2
Disclosed Hemichannel Combinations.
Hemichannel Combinations

| | | | | |
|---|---|---|---|---|
| CX26/CX26 | CX43/CX26 | CX32/CX26 | CX40/CX26 | CX37/CX26 |
| CX26/CX43 | CX43/CX43 | CX32/CX43 | CX40/CX43 | CX37/CX43 |
| CX26/CX30 | CX43/CX30 | CX32/CX30 | CX40/CX30 | CX37/CX30 |
| CX26/CX32 | CX43/CX32 | CX32/CX32 | CX40/CX32 | CX37/CX32 |
| CX26/CX31 | CX43/CX31 | CX32/CX31 | CX40/CX31 | CX37/CX31 |
| CX26/CX40 | CX43/CX40 | CX32/CX40 | CX40/CX40 | CX37/CX40 |
| CX26/CX37 | CX43/CX37 | CX32/CX37 | CX40/CX37 | CX37/CX37 |
| CX26/CX46 | CX43/CX46 | CX32/CX46 | CX40/CX46 | CX37/CX46 |
| CX26/CX50 | CX43/CX50 | CX32/CX50 | CX40/CX50 | CX37/CX50 |
| CX26/CX30.3 | CX43/CX30.3 | CX32/CX30.3 | CX40/CX30.3 | CX37/CX30.3 |
| CX26/CX45 | CX43/CX45 | CX32/CX45 | CX40/CX45 | CX37/CX45 |
| CX26/CX31.1 | CX43/CX31.1 | CX32/CX31.1 | CX40/CX31.1 | CX37/CX31.1 |
| CX26/CX36 | CX43/CX36 | CX32/CX36 | CX40/CX36 | CX37/CX36 |
| CX26/CX47 | CX43/CX47 | CX32/CX47 | CX40/CX47 | CX37/CX47 |
| CX26/CX30.2 | CX43/CX30.2 | CX32/CX30.2 | CX40/CX30.2 | CX37/CX30.2 |
| CX26/CX59 | CX43/CX59 | CX32/CX59 | CX40/CX59 | CX37/CX59 |
| CX26/CX62 | CX43/CX62 | CX32/CX62 | CX40/CX62 | CX37/CX62 |
| CX26/CX25 | CX43/CX25 | CX32/CX25 | CX40/CX25 | CX37/CX25 |
| CX26/CX31.9 | CX43/CX31.9 | CX32/CX31.9 | CX40/CX31.9 | CX37/CX31.9 |
| CX26/CX40.1 | CX43/CX40.1 | CX32/CX40.1 | CX40/CX40.1 | CX37/CX40.1 |
| CX26/CX23 | CX43/CX23 | CX32/CX23 | CX40/CX23 | CX37/CX23 |
| CX30/CX26 | CX31/CX26 | CX46/CX26 | CX50/CX26 | CX50/CX26 |
| CX30/CX43 | CX31/CX43 | CX46/CX43 | CX50/CX43 | CX50/CX43 |
| CX30/CX30 | CX31/CX30 | CX46/CX30 | CX50/CX30 | CX50/CX30 |
| CX30/CX32 | CX31/CX32 | CX46/CX32 | CX50/CX32 | CX50/CX32 |
| CX30/CX31 | CX31/CX31 | CX46/CX31 | CX50/CX31 | CX50/CX31 |
| CX30/CX40 | CX31/CX40 | CX46/CX40 | CX50/CX40 | CX50/CX40 |
| CX30/CX37 | CX31/CX37 | CX46/CX37 | CX50/CX37 | CX50/CX37 |
| CX30/CX46 | CX31/CX46 | CX46/CX46 | CX50/CX46 | CX50/CX46 |
| CX30/CX50 | CX31/CX50 | CX46/CX50 | CX50/CX50 | CX50/CX50 |
| CX30/CX30.3 | CX31/CX30.3 | CX46/CX30.3 | CX50/CX30.3 | CX50/CX30.3 |
| CX30/CX45 | CX31/CX45 | CX46/CX45 | CX50/CX45 | CX50/CX45 |
| CX30/CX31.1 | CX31/CX31.1 | CX46/CX31.1 | CX50/CX31.1 | CX50/CX31.1 |
| CX30/CX36 | CX31/CX36 | CX46/CX36 | CX50/CX36 | CX50/CX36 |
| CX30/CX47 | CX31/CX47 | CX46/CX47 | CX50/CX47 | CX50/CX47 |
| CX30/CX30.2 | CX31/CX30.2 | CX46/CX30.2 | CX50/CX30.2 | CX50/CX30.2 |
| CX30/CX59 | CX31/CX59 | CX46/CX59 | CX50/CX59 | CX50/CX59 |
| CX30/CX62 | CX31/CX62 | CX46/CX62 | CX50/CX62 | CX50/CX62 |
| CX30/CX25 | CX31/CX25 | CX46/CX25 | CX50/CX25 | CX50/CX25 |
| CX30/CX31.9 | CX31/CX31.9 | CX46/CX31.9 | CX50/CX31.9 | CX50/CX31.9 |
| CX30/CX40.1 | CX31/CX40.1 | CX46/CX40.1 | CX50/CX40.1 | CX50/CX40.1 |
| CX30/CX23 | CX31/CX23 | CX46/CX23 | CX50/CX23 | CX50/CX23 |
| CX45/CX26 | CX31.1/CX26 | CX36/CX26 | CX47/CX26 | CX30.2/CX26 |
| CX45/CX43 | CX31.1/CX43 | CX36/CX43 | CX47/CX43 | CX30.2/CX43 |
| CX45/CX30 | CX31.1/CX30 | CX36/CX30 | CX47/CX30 | CX30.2/CX30 |
| CX45/CX32 | CX31.1/CX32 | CX36/CX32 | CX47/CX32 | CX30.2/CX32 |
| CX45/CX31 | CX31.1/CX31 | CX36/CX31 | CX47/CX31 | CX30.2/CX31 |
| CX45/CX40 | CX31.1/CX40 | CX36/CX40 | CX47/CX40 | CX30.2/CX40 |
| CX45/CX37 | CX31.1/CX37 | CX36/CX37 | CX47/CX37 | CX30.2/CX37 |
| CX45/CX46 | CX31.1/CX46 | CX36/CX46 | CX47/CX46 | CX30.2/CX46 |
| CX45/CX50 | CX31.1/CX50 | CX36/CX50 | CX47/CX50 | CX30.2/CX50 |
| CX45/CX30.3 | CX31.1/CX30.3 | CX36/CX30.3 | CX47/CX30.3 | CX30.2/CX30.3 |
| CX45/CX45 | CX31.1/CX45 | CX36/CX45 | CX47/CX45 | CX30.2/CX45 |
| CX45/CX31.1 | CX31.1/CX31.1 | CX36/CX31.1 | CX47/CX31.1 | CX30.2/CX31.1 |
| CX45/CX36 | CX31.1/CX36 | CX36/CX36 | CX47/CX36 | CX30.2/CX36 |
| CX45/CX47 | CX31.1/CX47 | CX36/CX47 | CX47/CX47 | CX30.2/CX47 |
| CX45/CX30.2 | CX31.1/CX30.2 | CX36/CX30.2 | CX47/CX30.2 | CX30.2/CX30.2 |
| CX45/CX59 | CX31.1/CX59 | CX36/CX59 | CX47/CX59 | CX30.2/CX59 |
| CX45/CX62 | CX31.1/CX62 | CX36/CX62 | CX47/CX62 | CX30.2/CX62 |
| CX45/CX25 | CX31.1/CX25 | CX36/CX25 | CX47/CX25 | CX30.2/CX25 |
| CX45/CX31.9 | CX31.1/CX31.9 | CX36/CX31.9 | CX47/CX31.9 | CX30.2/CX31.9 |
| CX45/CX40.1 | CX31.1/CX40.1 | CX36/CX40.1 | CX47/CX40.1 | CX30.2/CX40.1 |
| CX45/CX23 | CX31.1/CX23 | CX36/CX23 | CX47/CX23 | CX30.2/CX23 |
| CX62/CX26 | CX25/CX26 | CX31.9/CX26 | CX40.1/CX26 | CX23/CX26 |
| CX62/CX43 | CX25/CX43 | CX31.9/CX43 | CX40.1/CX43 | CX23/CX43 |
| CX62/CX30 | CX25/CX30 | CX31.9/CX30 | CX40.1/CX30 | CX23/CX30 |
| CX62/CX32 | CX25/CX32 | CX31.9/CX32 | CX40.1/CX32 | CX23/CX32 |
| CX62/CX31 | CX25/CX31 | CX31.9/CX31 | CX40.1/CX31 | CX23/CX31 |
| CX62/CX40 | CX25/CX40 | CX31.9/CX40 | CX40.1/CX40 | CX23/CX40 |
| CX62/CX37 | CX25/CX37 | CX31.9/CX37 | CX40.1/CX37 | CX23/CX37 |
| CX62/CX46 | CX25/CX46 | CX31.9/CX46 | CX40.1/CX46 | CX23/CX46 |
| CX62/CX50 | CX25/CX50 | CX31.9/CX50 | CX40.1/CX50 | CX23/CX50 |
| CX62/CX30.3 | CX25/CX30.3 | CX31.9/CX30.3 | CX40.1/CX30.3 | CX23/CX30.3 |
| CX62/CX45 | CX25/CX45 | CX31.9/CX45 | CX40.1/CX45 | CX23/CX45 |
| CX62/CX31.1 | CX25/CX31.1 | CX31.9/CX31.1 | CX40.1/CX31.1 | CX23/CX31.1 |
| CX62/CX36 | CX25/CX36 | CX31.9/CX36 | CX40.1/CX36 | CX23/CX36 |
| CX62/CX47 | CX25/CX47 | CX31.9/CX47 | CX40.1/CX47 | CX23/CX47 |
| CX62/CX30.2 | CX25/CX30.2 | CX31.9/CX30.2 | CX40.1/CX30.2 | CX23/CX30.2 |
| CX62/CX59 | CX25/CX59 | CX31.9/CX59 | CX40.1/CX59 | CX23/CX59 |
| CX62/CX62 | CX25/CX62 | CX31.9/CX62 | CX40.1/CX62 | CX23/CX62 |
| CX62/CX25 | CX25/CX25 | CX31.9/CX25 | CX40.1/CX25 | CX23/CX25 |
| CX62/CX31.9 | CX25/CX31.9 | CX31.9/CX31.9 | CX40.1/CX31.9 | CX23/CX31.9 |
| CX62/CX40.1 | CX25/CX40.1 | CX31.9/CX40.1 | CX40.1/CX40.1 | CX23/CX40.1 |
| CX62/CX23 | CX25/CX23 | CX31.9/CX23 | CX40.1/CX23 | CX23/CX23 |
| CX59/CX26 | CX59/CX31 | CX59/CX50 | CX59/CX36 | CX59/CX62 |
| CX59/CX43 | CX59/CX40 | CX59/CX30.3 | CX59/CX47 | CX59/CX25 |
| CX59/CX30 | CX59/CX37 | CX59/CX45 | CX59/CX30.2 | CX59/CX31.9 |
| CX59/CX32 | CX59/CX46 | CX59/CX31.1 | CX59/CX59 | CX59/CX40.1 |
| CX59/CX23 | | | | |

### 2. Connexin Nucleic Add Molecules

[0077] Disclosed herein is an isolated nucleic acid molecule comprising a sequence that encodes the sequence set forth in any one of SEQ ID NO:01-SEQ ID NO:21, or a fragment thereof. Disclosed herein is an isolated nucleic acid molecule comprising a sequence that encodes the sequence set forth in any one sequence provided in Table 5. Disclosed herein is an isolated nucleic acid molecule comprising the sequence set forth in any of SEQ ID NO:22 to SEQ ID NO:42, or a fragment thereof. Disclosed herein is an isolated nucleic acid molecule comprising any sequence set forth in Table 6. Disclosed herein is an isolated nucleic acid molecule comprising a sequence that encodes the sequence set forth in any one of SEQ ID NO:01-SEQ ID NO:21, or a fragment thereof, and which sequence comprises one or more mutations. Disclosed herein is an isolated nucleic acid molecule comprising the sequence set forth in any of SEQ ID NO:22 to SEQ ID NO:42, or a fragment thereof, and which sequence comprises one or more mutations.

[0078] Disclosed herein is an isolated nucleic acid molecule comprising a sequence that encodes the sequence set forth in UniKBProt sequence P17302, Q9Y6H8, P35212, P36382, P48165, P57773, Q969M2, P08034, P29033, O75712, Q9NTQ9, O95377, O95452, Q6PEY0, P36383, Q5T442, Q8NFK1, Q9UKL4, Q8N144, Q96KN9, or A6NN92, or a fragment thereof. Disclosed herein is an isolated nucleic acid molecule comprising a sequence set forth in NCBI Entrez Gene ID #2072, 2697, 2700, 2701, 2703, 2705, 2706, 2707, 2709, 10052, 10804, 57165, 57369, 81025, 84694, 125111, 127534, 219770, 349149, 375519, or 100126572, or a fragment thereof. Disclosed herein is an isolated nucleic acid molecule comprising a sequence corresponding to GJB2, GJA1, GJB6, GJB1, GJB3, GJA5, GJA4, GJA3, GJA8, GJB4, GJC1, GJB5, GJD2, GJC2, GJC3, GJA9, GJA10, GJB7, GJD3, GJD4, or GJE1, or a fragment thereof. Disclosed herein is an isolated nucleic acid molecule comprising a sequence that encodes the sequence set forth in UniKBProt sequence P17302, Q9Y6H8, P35212, P36382, P48165, P57773, Q969M2, P08034, P29033, O75712, Q9NTQ9, O95377, O95452, Q6PEY0, P36383, Q5T442, Q8NFK1, Q9UKL4, Q8N144, Q96KN9, or A6NN92, or a fragment thereof, and which sequence comprises one or more mutations. Disclosed herein is an isolated nucleic acid molecule comprising a sequence set forth in NCBI Entrez Gene ID #2072, 2697, 2700, 2701, 2703, 2705, 2706, 2707, 2709, 10052, 10804, 57165, 57369, 81025, 84694, 125111, 127534, 219770, 349149, 375519, or 100126572, or a fragment thereof and which sequence comprises one or more mutations. Disclosed herein is an isolated nucleic acid molecule comprising a sequence corresponding to GJB2, GJA1, GJB6, GJB1, GJB3, GJA5, GJA4, GJA3, GJA8, GJB4, GJC1, GJB5, GJD2, GJC2, GJC3, GJA9, GJA10, GJB7, GJD3, GJD4, or GJE1, or a fragment thereof, and which sequence comprises one or more mutations.

[0079] In an aspect, a disclosed mutation can affect a transmembrane helix, an extracellular loop, a cytoplasmic loop, an intracellular amino terminal, or an intracellular carboxy terminal of a disclosed connexin protein. In an aspect, a disclosed nucleic acid sequence can be codon-optimized, for example, for expression in human cells.

[0080] Disclosed herein is an isolated nucleic acid molecule comprising a sequence that encodes the sequence set forth in any one of SEQ ID NO:01-SEQ ID NO:21, or a fragment thereof, or a mutant thereof, and a sequence encoding a tag and/or label.

[0081] Disclosed herein is an isolated nucleic acid molecule comprising a sequence that encodes the sequence set forth in any one sequence in Table 5, and a sequence encoding a tag and/or label.

[0082] Disclosed herein is an isolated nucleic acid molecule comprising a sequence that encodes the sequence set forth in UniKBProt sequence P17302, Q9Y6H8, P35212, P36382, P48165, P57773, Q969M2, P08034, P29033, O75712, Q9NTQ9, O95377, O95452, Q6PEY0, P36383, Q5T442, Q8NFK1, Q9UKL4, Q8N144, Q96KN9, or A6NN92, or a fragment thereof, or a mutant thereof, and a sequence encoding a tag and/or label. Disclosed herein is an isolated nucleic acid molecule comprising a sequence set forth in NCBI Entrez Gene ID #2072, 2697, 2700, 2701, 2703, 2705, 2706, 2707, 2709, 10052, 10804, 57165, 57369, 81025, 84694, 125111, 127534, 219770, 349149, 375519, or 100126572, or a fragment thereof, or a mutant thereof, and a sequence encoding a tag and/or label. Disclosed herein is an isolated nucleic acid molecule comprising a sequence corresponding to GJB2, GJA1, GJB6, GJB1, GJB3, GJA5, GJA4, GJA3, GJA8, GJB4, GJC1, GJB5, GJD2, GJC2, GJC3, GJA9, GJA10, GJB7, GJD3, GJD4, or GJE1, or a fragment thereof, or a mutant thereof, and a sequence encoding a tag and/or label.

[0083] Disclosed herein is an isolated nucleic acid molecule comprising the sequence set forth in any one of SEQ ID NO:22 to SEQ ID NO:42, or a fragment thereof, or a mutant thereof, and a sequence encoding a tag and/or label.

[0084] In an aspect, a disclosed nucleic acid sequence can be codon-optimized, for example, for expression in human cells, and a sequence encoding a tag and/or label.

[0085] Disclosed herein is an isolated nucleic acid molecule comprising a sequence that encodes the sequence set forth in any one of SEQ ID NO:01-SEQ ID NO:21, or a fragment thereof, or a mutant thereof, and a sequence encoding a tag and/or label. Disclosed herein is an isolated nucleic acid molecule comprising a sequence that encodes the sequence set forth in any one sequence of Table 5, or a fragment thereof, or a mutant thereof, and a sequence encoding a tag and/or label.

[0086] Disclosed herein is an isolated nucleic acid molecule comprising the sequence set forth in any one of SEQ ID NO:22-SEQ ID NO:42, or a fragment thereof, or a mutant thereof, and a sequence encoding a tag and/or label.

[0087] Disclosed herein are docked hemichannels comprising a first disclosed connexin encoded by a disclosed isolated nucleic acid molecule and a second disclosed connexin encoded by a disclosed isolated nucleic acid molecule.

[0088] Disclosed herein are docked hemichannels comprising a first disclosed connexin encoded by a disclosed isolated nucleic acid molecule comprising the sequence set forth in any one of SEQ ID NO:22-SEQ ID NO:42, or a fragment thereof, or a mutant thereof, and a second disclosed connexin encoded by a disclosed isolated nucleic acid molecule comprising the sequence set forth in any one of SEQ ID NO:22-SEQ ID NO:42, or a fragment thereof, or a mutant thereof.

### 3. Cells

[0089] Disclosed herein is a cell comprising a disclosed isolated nucleic acid molecule or a disclosed plasmid. Disclosed herein are cells transfected by one or more disclosed nucleic acid molecules. In an aspect, disclosed transfected cells can comprise HEK 293FT cells. HEK 293FT cells are known to the art. In an aspect, disclosed transfected cells can comprise any human cells. In an aspect, disclosed transfected cells can comprise any cells that express connexins. In an aspect, disclosed transfected cells can comprise any cells that express connexins. Cells are known to the art.

[0090] Disclosed herein are cells transfected by any plasmid set forth in Table 3. Disclosed herein are a pair of cells, each transfected by a plasmid set forth in Table 3.

[0091] Disclosed herein are cells transfected by an isolated nucleic acid molecule comprising a nucleic acid sequence encoding the sequence set forth in any one of SEQ ID NO:01-SEQ ID NO:21, or a fragment thereof. Disclosed herein are cells transfected by an isolated nucleic acid molecule comprising a nucleic acid sequence encoding the sequence set forth in any sequence provided in Table 5.

[0092] Disclosed herein are cells transfected by an isolated nucleic acid molecule comprising a nucleic acid sequence that encodes the sequence set forth in UniKBProt sequence P17302, Q9Y6H8, P35212, P36382, P48165, P57773, Q969M2, P08034, P29033, O75712, Q9NTQ9, O95377, O95452, Q6PEY0, P36383, Q5T442, Q8NFK1, Q9UKL4, Q8N144, Q96KN9, or A6NN92, or a fragment thereof. Disclosed herein are cells transfected by an isolated nucleic acid molecule comprising the nucleic acid sequence set forth in NCBI Entrez Gene ID #2072, 2697, 2700, 2701, 2703, 2705, 2706, 2707, 2709, 10052, 10804, 57165, 57369, 81025, 84694, 125111, 127534, 219770, 349149, 375519, or 100126572, or a fragment thereof. Disclosed herein are cells transfected by an isolated nucleic acid molecule comprising a nucleic acid sequence corresponding to GJB2, GJA1, GJB6, GJB1, GJB3, GJA5, GJA4, GJA3, GJA8, GJB4, GJC1, GJB5, GJD2, GJC2, GJC3, GJA9, GJA10, GJB7, GJD3, GJD4, or GJE1, or a fragment thereof.

[0093] Disclosed herein are cells transfected by an isolated nucleic acid molecule comprising the sequence set forth in any one of SEQ ID NO:22 to SEQ ID NO:42, or a fragment thereof. Disclosed herein are cells transfected by an isolated nucleic acid molecule comprising any sequence set forth in Table 6. Disclosed herein are cells transfected by an isolated nucleic acid molecule comprising a nucleic acid sequence encoding the sequence set forth in any one of SEQ ID NO:01-SEQ ID NO:21, or a fragment thereof, and which sequence comprises one or more mutations.

[0094] Disclosed herein are cells transfected by an isolated nucleic acid molecule comprising a nucleic acid sequence that encodes the sequence set forth in UniKBProt sequence P17302, Q9Y6H8, P35212, P36382, P48165, P57773, Q969M2, P08034, P29033, O75712, Q9NTQ9, O95377, O95452, Q6PEY0, P36383, Q5T442, Q8NFK1, Q9UKL4, Q8N144, Q96KN9, or A6NN92, or a fragment thereof and which sequence comprises one or more mutations. Disclosed herein are cells transfected by an isolated nucleic acid molecule comprising the nucleic acid sequence set forth in NCBI Entrez Gene ID #2072, 2697, 2700, 2701, 2703, 2705, 2706, 2707, 2709, 10052, 10804, 57165, 57369, 81025, 84694, 125111, 127534, 219770, 349149, 375519, or 100126572, or a fragment thereof, and which sequence comprises one or more mutations.

[0095] Disclosed herein are cells transfected by an isolated nucleic acid molecule comprising a nucleic acid sequence corresponding to GJB2, GJA1, GJB6, GJB1, GJB3, GJA5, GJA4, GJA3, GJA8, GJB4, GJC1, GJB5, GJD2, GJC2, GJC3, GJA9, GJA10, GJB7, GJD3, GJD4, or GJE1, or a fragment thereof, and which sequence comprises one or more mutations.

[0096] Disclosed herein are cells transfected by an isolated nucleic acid molecule comprising the sequence set forth in any one of SEQ ID NO:22 to SEQ ID NO:42, or a fragment thereof, and which sequence comprises one or more mutations. Disclosed herein are cells transfected by an isolated nucleic acid molecule comprising any sequence set forth in Table 6, and which sequence comprises one or more mutations.

[0097] In an aspect, disclosed cells can comprise cells harvested and/or obtained from a subject. In an aspect, disclosed cells can comprise cells harvested and/or obtained from a subject suspected of having or diagnosed with a disease or disorder such as, for example, a disease or disorder characterized by gap junction dysfunction and/or gap junction pathophysiology.

[0098] Techniques to achieve transfection are known to the art and using transfected cells are known to the art.

### 4. Plasmids

[0099] Disclosed herein is a plasmid used in a disclosed method. Disclosed herein is a plasmid comprising one or more disclosed isolated nucleic acid molecules. Disclosed here are the plasmids of Table 3, which can be used in a disclosed method. Disclosed here are a pair of plasmids that can be used in a disclosed method, wherein the pair of plasmids are set forth in Table 3.

[0100] For example, in an aspect, a disclosed plasmid can comprise an isolated nucleic acid molecule comprising the sequence set forth in any one of SEQ ID NO:22-SEQ ID NO:42, or a fragment thereof. In an aspect, a disclosed plasmid can comprise an isolated nucleic acid molecule encoding the sequence set forth in any one of SEQ ID NO:01-SEQ ID NO:21, or a fragment thereof. For example, in an aspect, a disclosed plasmid can comprise an isolated nucleic acid molecule comprising the sequence set forth in any one of SEQ ID NO:22-SEQ ID NO:42, or a fragment thereof, and a nucleic acid sequence encoding a fluorescent label and/or tag. In an aspect, a disclosed plasmid can comprise an isolated nucleic acid molecule encoding the sequence set forth in any one of SEQ ID NO:01-SEQ ID NO:21, or a fragment thereof, and a nucleic acid sequence encoding a fluorescent label and/or tag. In an aspect, a disclosed plasmid can comprise an isolated nucleic acid molecule comprising the sequence set forth in any one of SEQ ID NO:22-SEQ ID NO:42, or a fragment thereof, and which sequence comprises one or more mutations. In an aspect, a disclosed plasmid can comprise an isolated nucleic acid molecule encoding the sequence set forth in any one of SEQ ID NO:01-SEQ ID NO:21, or a fragment thereof, and which sequence comprises one or more mutations. For example, in an aspect, a disclosed plasmid can comprise an isolated nucleic acid molecule comprising the sequence set forth in any one of SEQ ID NO:22-SEQ ID NO:42, or a fragment thereof, and which sequence comprises one or more mutations, and a nucleic acid sequence encoding a fluorescent label and/or tag. In an aspect, a disclosed plasmid can comprise an isolated nucleic acid molecule encoding the sequence set forth in any one of SEQ ID NO:01-SEQ ID NO:21, or a fragment thereof, and which sequence comprises one or more mutations, and a nucleic acid sequence encoding a fluorescent label and/or tag.

[0101] In an aspect, a disclosed fluorescent label or disclosed fluorophore can comprise enhanced green fluorescent protein (EGFP), mEmerald, enhanced yellow fluorescent protein (EYFP), mApple, TdTomato, mCherry, miRFP670, any known fluorescent label or tag, or any combination thereof. In an aspect, a disclosed fluorescent label or disclosed fluorophore can comprise any fluorescent label or fluorophore that is amendable to analysis via flow cytometry. In an aspect, a pair of disclosed fluorescent labels or disclosed fluorophores can comprise any pair of fluorescent labels or fluorophores that is amendable to analysis via flow cytometry and have excitation and emission spectra that can be isolated or separated from each other, thereby enabling the interrogation of the docking interactions. The art if fam Fluorophores and fluorescent labels are known in the art.

[0102] Disclosed herein is a plasmid comprising the sequence set forth in any one of SEQ ID NO:43-SEQ ID NO:86 or a fragment thereof. Disclosed herein is a plasmid comprising the sequence set forth in any one sequence set forth in Table 3. Plasmids and using plasmids are known to the art.

TABLE 3
Disclosed Plasmids.

| SEQ ID NO: | Plasmid Description |
|---|---|
| 43 | Cx23-mEmeraldN1 |
| 44 | Cx25-mEmeraldN1 |
| 45 | Cx26-mEmeraldN1 |
| 46 | Cx30-mEmeraldN1 |
| 47 | Cx30.3-mEmeraldN1 |
| 48 | Cx31-mEmeraldN1 |
| 49 | Cx31.1-mEmeraldN1 |
| 50 | Cx31.3-mEmeraldN1 |
| 51 | Cx31.9-mEmeraldN1 |
| 52 | Cx32-mEmeraldN1 |
| 53 | Cx36-mEmeraldN1 |
| 54 | Cx37-mEmeraldN1 |
| 55 | Cx40-mEmeraldN1 |
| 56 | Cx40.1-mEmeraldN1 |
| 57 | Cx43-mEmeraldN1 |
| 58 | Cx45-mEmeraldN1 |
| 59 | Cx46-mEmeraldN1 |
| 60 | Cx47-mEmeraldN1 |
| 61 | Cx50-mEmeraldN1 |
| 62 | Cx59-mEmeraldN1 |
| 63 | Cx62-mEmeraldN1 |
| 64 | Cx43-ELs-Cx26-mEmeraldN1 |
| 65 | Cx23-iRFP670 |
| 66 | Cx25-iRFP670 |
| 67 | Cx26-iRFP670 |
| 68 | Cx30-iRFP670 |
| 69 | Cx30.3-iRFP670 |
| 70 | Cx31-iRFP670 |
| 71 | Cx31.1-iRFP670 |
| 72 | Cx31.3 -iRFP670 |
| 73 | Cx31.9-iRFP670 |
| 74 | Cx32-iRFP670 |
| 75 | Cx36-iRFP670 |
| 76 | Cx37-iRFP670 |
| 77 | Cx40-iRFP670 |
| 78 | Cx40.1-iRFP670 |
| 79 | Cx43-iRFP670 |
| 80 | Cx45-iRFP670 |
| 81 | Cx46-iRFP670 |
| 82 | Cx47-iRFP670 |
| 83 | Cx50-iRFP670 |
| 84 | Cx59-iRFP670 |
| 85 | Cx62-iRFP670 |
| 86 | Cx43-mAppleN1 |

### 5. Kits

[0103] Disclosed herein is a kit comprising one or more disclosed isolated nucleic acid molecules, one or more disclosed proteins, one or more disclosed cells, or any combination thereof. Disclosed herein is a kit comprising a disclosed connexin protein. Disclosed herein is a kit comprising a disclosed connexin protein comprising a label and/or a tag. Disclosed herein is a kit comprising one or more disclosed cells. Disclosed herein is a kit comprising one or more disclosed isolated nucleic acid molecules. Disclosed herein is a kit comprising one or more disclosed cells transfected with a nucleic acid molecule comprising the sequence set forth in any one of SEQ ID NO:22-SEQ ID NO:42, or a fragment thereof. Disclosed herein is a kit comprising one or more disclosed cells transfected with a nucleic acid molecule encoding a connexin having the sequence set forth in any one of SEQ ID NO:01-SEQ ID NO:21, or a fragment thereof. Disclosed herein is a kit comprising one or more disclosed cells transfected with a nucleic acid molecule comprising the sequence set forth in any one of SEQ ID NO:22-SEQ ID NO:42, or a fragment thereof, and which sequence comprises one or more mutations. Disclosed herein is a kit comprising one or more disclosed cells transfected with a nucleic acid molecule encoding a connexin having the sequence set forth in any one of SEQ ID NO:01-SEQ ID NO:21, or a fragment thereof, and which sequence comprises one or more mutations.

[0104] Disclosed herein is a kit comprising one or more disclosed compositions and/or components and/or agents that can be used in any disclosed method.

[0105] In an aspect of a disclosed kit, a disclosed fluorescent label or a fluorescent tag. In an aspect, a disclosed fluorescent label or disclosed fluorophore can comprise enhanced green fluorescent protein (EGFP), mEmerald, enhanced yellow fluorescent protein (EYFP), mApple, TdTomato, mCherry, miRFP670, any known fluorescent label or tag, or any combination thereof. In an aspect of a disclosed kit, a disclosed fluorescent label or disclosed fluorophore can comprise any fluorescent label or fluorophore that is amendable to analysis via flow cytometry. In an aspect of a disclosed kit, a pair of disclosed fluorescent labels or disclosed fluorophores can comprise any pair of fluorescent labels or fluorophores that is amendable to analysis via flow cytometry and have excitation and emission spectra that can be isolated or separated from each other, thereby enabling the interrogation of the docking interactions. Fluorophores and fluorescent labels are known in the art.

[0106] In an aspect, a disclosed kit can comprise at least two components constituting the kit. Together, the components constitute a functional unit for a given purpose (such as, for example, performing any aspect of a disclosed method including preparing the components used in a disclosed method). Individual member components may be physically packaged together or separately. For example, a kit comprising an instruction for using the kit may or may not physically include the instruction with other individual member components. Instead, the instruction can be supplied as a separate member component, either in a paper form or an electronic form which may be supplied on computer readable memory device or downloaded from an internet website, or as recorded presentation. In an aspect, a kit for use in a disclosed method can comprise one or more containers holding a disclosed composition, a disclosed pharmaceutical formulation, a disclosed therapeutic agent, and a label or package insert with instructions for use. In an aspect, suitable containers include, for example, bottles, vials, syringes, blister pack, etc. The containers can be formed from a variety of materials such as glass or plastic. The container can hold a disclosed composition, a disclosed pharmaceutical formulation, a disclosed therapeutic agent, or a combination thereof, and can have a sterile access port (for example the container may be an intravenous solution bag or a vial having a stopper pierceable by a hypodermic injection needle). The label or package insert can indicate that a disclosed composition, a disclosed connexin, a disclosed nucleic acid molecule, a disclosed cell, or a combination thereof, can be used in a disclosed method. A kit can comprise additional components necessary for administration such as, for example, other buffers, diluents, filters, needles, and syringes. In an aspect, a disclosed kit can be used to evaluate gap junction formation, interrogate the docking interactions between connexin, perform high-throughput quantification of gap junction hemichannel docketing, or any combination thereof.

[0107] In an aspect, a disclosed kit can comprise one or more disclosed plasmids, such as, for example, those plasmids identified in Table 3. In an aspect, a disclosed kit can comprise one or more disclosed primers, such as, for example, those plasmids identified in Table 4. In an aspect, a disclosed kit can comprise one or more populations of cells, each population transfected by a plasmids identified in Table 4.

### B. Methods

### 1. Methods of Evaluating Gap Junction Formation

[0108] Disclosed herein is a method of evaluating gap junction formation, the method comprising performing flow enabled tracking of connexosomes in HEK293T cells (FETCH).

[0109] In an aspect, performing FETCH can comprises (i) generating fluorescent connexosomes, and (ii) using flow cytometry to track the fluorescent connexosomes in one or more cell samples. In an aspect, performing FETCH can comprise employing one or more plasmids listed in Table 3.

[0110] In an aspect, generating one or more fluorescent connexosomes can comprise transfecting a first population of cells with a first fluorescently labeled, C-terminally fused connexin construct; and transfecting a second population of cells with a second fluorescently-labeled, C-terminally fused connexin construct.

[0111] In an aspect, a disclosed method of evaluating gap junction formation can employ one or more plasmids listed in Table 3. In an aspect, one or more disclosed plasmids can comprise any pair of fluorescent labels or fluorophores that is amendable to analysis via flow cytometry and have excitation and emission spectra that can be isolated or separated from each other, thereby enabling the interrogation of the docking interactions.

[0112] In an aspect, a disclosed fluorescent label or disclosed fluorophore can comprise enhanced green fluorescent protein (EGFP), mEmerald, enhanced yellow fluorescent protein (EYFP), mApple, TdTomato, mCherry, miRFP670, any known fluorescent label or tag, or any combination thereof. In an aspect, a disclosed fluorescent label or disclosed fluorophore can comprise any fluorescent label or fluorophore that is amendable to analysis via flow cytometry. In an aspect, a pair of disclosed fluorescent labels or disclosed fluorophores can comprise any pair of fluorescent labels or fluorophores that is amendable to analysis via flow cytometry and have excitation and emission spectra that can be isolated or separated from each other, thereby enabling the interrogation of the docking interactions. Fluorophores and fluorescent labels are known in the art.

[0113] In an aspect, a disclosed method can further comprise incubating the transfected populations of cells. In an aspect of a disclosed method, incubating the transfected populations of cells can comprise about 10 hours to about 24 hours. For example, in an aspect, incubating can comprise about 10 hrs, about 11 hrs, about 12 hrs, about 13 hrs, about 14 hrs, about 15 hrs, about 16 hrs, about 17 hrs, about 18 hrs, about 19 hours, about 20 hrs, about 21 hrs, about 22 hrs, about 23 hrs, or about 24 hours. In an aspect, incubating can comprise less than 10 hrs or more than 24 hrs. In an aspect, incubating the transfected populations of cells can comprises about 16 hours to about 18 hours.

[0114] In an aspect, a disclosed method can further comprise trypsinizing the incubated and transfected population of cells. Trypsinization, methods of trypsinization, and agents for trypsinizing are known to the art.

[0115] In an aspect, a disclosed method can further comprise incubating the trypsinized first population of cells with the trypsinized second population of cells.

[0116] In an aspect of a disclosed method, incubating the combined populations of cells can comprise about 10 hours to about 30 hours. For example, in an aspect, incubating the combined populations of cells can comprise about 10 hrs, about 11 hrs, about 12 hrs, about 13 hrs, about 14 hrs, about 15 hrs, about 16 hrs, about 17 hrs, about 18 hrs, about 19 hours, about 20 hrs, about 21 hrs, about 22 hrs, about 23 hrs, about 24 hrs, about 25 hrs, about 26 hrs, about 27 hrs, about 28 hrs, about 29 hrs, or about 30 hrs. In an aspect, incubating the combined populations of cells can comprise less than 10 hrs or more than 30 hrs. In an aspect, incubating the combined populations of cells can comprise about 20 hrs. In an aspect of a disclosed method, incubating the combined populations of cells can continue to hyperdensity and/or over-confluency.

[0117] In an aspect, a disclosed method can comprise trypsinizing the incubated combined population of cells, resuspending the trypsinized cells, and fixing the resuspended cells.

[0118] In an aspect, resuspending the trypsinized cells can comprise PBS and DNase. In an aspect of a disclosed method, fixing the resuspended cells can comprise paraformaldehyde. Methods of fixation and agents for fixation are known to the art.

[0119] In an aspect of a disclosed method, during flow cytometry, the cells can be analyzed in two selection gates prior to fluorescence evaluation. In an aspect, analyzing the cells in two selection gates can comprises (i) identifying cells by evaluating sample forward vs. side scatter area; and (ii) identifying single cells by evaluating cells that maintained a linear correlation of forward scatter height to forward scatter area.

[0120] In an aspect, incubating the combined populations of cells can comprise further comprising generating one or more fluorescently-labeled, C-terminally fused connexin constructs. Isolated nucleic acid molecules comprising a nucleic acid sequence encoding a connexin protein are disclosed herein.

[0121] In an aspect, a disclosed first fluorescently-labeled, C-terminally fused connexin construct can comprise CX23, CX25, CX26, CX30, CX30.2/CX31.3, CX30.3, CX31, CX31.1, CX31.9/CX30.2, CX32, CX36, CX37, CX40, CX40.1, CX43, CX45, CX46, CX47, CX50, CX59, CX62, or a mutant thereof. In an aspect, a disclosed second fluorescently-labeled, C-terminally fused connexin construct can comprise CX23, CX25, CX26, CX30, CX30.2/CX31.3, CX30.3, CX31, CX31.1, CX31.9/CX30.2, CX32, CX36, CX37, CX40, CX40.1, CX43, CX45, CX46, CX47, CX50, CX59, CX62, or a mutant thereof.

[0122] In an aspect, a disclosed first connexin protein can comprise the sequence set forth in UniProtKB sequence P17302, Q9Y6H8, P35212, P36382, P48165, P57773, Q969M2, P08034, P29033, O75712, Q9NTQ9, O95377, O95452, Q6PEY0, P36383, Q5T442, Q8NFK1, Q9UKL4, Q8N144, Q96KN9, A6NN92, or a fragment thereof. In an aspect, a disclosed second connexin protein can comprise the sequence set forth in UniProtKB sequence P17302, Q9Y6H8, P35212, P36382, P48165, P57773, Q969M2, P08034, P29033, O75712, Q9NTQ9, O95377, O95452, Q6PEY0, P36383, Q5T442, Q8NFK1, Q9UKL4, Q8N144, Q96KN9, A6NN92, or a fragment thereof.

[0123] In an aspect, a disclosed first connexin protein can comprise the sequence set forth in any one of SEQ ID NO:01-SEQ ID NO:21, or a fragment thereof. In an aspect, a disclosed first connexin protein can comprise the sequence set forth in any sequence provided in Table 5. In an aspect, a disclosed second connexin protein can comprise the sequence set forth in any one of SEQ ID NO:01-SEQ ID NO:21, or a fragment thereof. In an aspect, a disclosed second connexin protein can comprise the sequence set forth in any sequence provided in Table 5. In an aspect, a disclosed first connexin protein can be encoded by the sequence set forth in any one of SEQ ID NO:22-SEQ ID NO:42, or a fragment thereof, or a mutant thereof. In an aspect, a disclosed second connexin protein can be encoded by the sequence set forth in any one of SEQ ID NO:22-SEQ ID NO:42, or a fragment thereof, or a mutant thereof. In an aspect, a disclosed connexin construct can comprise a connexin suspected of having an etiological influence in a disease or disorder. In an aspect, a disclosed connexin construct can comprise a connexin confirmed to have an etiological influence in a disease or disorder.

[0124] In an aspect, flow cytometry can generate a fluorescent profile for each cell sample or each population of cells.

[0125] In an aspect, a disclosed fluorescence profile can comprise 4 quadrants. In an aspect, disclosed quadrants can comprise Q1, Q2, Q3, and Q4. In an aspect, a disclosed Q1 can represent a population of cells with the first fluorescently-labeled, C-terminally fused connexin construct. In an aspect, a disclosed Q2 can represent a population of cells expressing both the first fluorescently-labeled, C-terminally fused connexin construct and the second fluorescently-labeled C-terminally fused connexin construct. In an aspect, a disclosed Q3 can represent a population of cells with the second fluorescently-labeled C-terminally fused connexin construct. In an aspect, a disclosed Q4 can represent untransfected cells in either the first population of cells or the second populations of cells.

[0126] In an aspect, a disclosed method of evaluating gap junction formation can further comprise establishing a FETCH score. In an aspect, a disclosed FETCH score can be a positive FETCH score or a negative FETCH score. In an aspect, a disclosed positive FETCH score can indicate a docking event. In an aspect, a disclosed negative FETCH score can indicate a non-docking event. In an aspect, a disclosed negative FETCH score can indicate dysfunctional gap junction intercellular communication. In an aspect, a disclosed FETCH score can comprise the proportion of dual colored-cells compared to fluorescent cells. In an aspect, a disclosed proportion can comprise Q2/(Q1+Q2+Q3).

[0127] In an aspect, a disclosed method of evaluating gap junction formation can comprise quantifying the fluorescence exchange between cells mediated by connexosomes.

[0128] In an aspect, a disclosed method of evaluating gap junction formation can comprise confirming the relationship between the fluorescence exchange phenotype and the connexosome formation.

[0129] In an aspect, confirming the relationship between the fluorescence exchange phenotype and connexosome formation can comprise using fluorescence-activated cell sorting (FACS) to collect cells from Q2 for microscopy analysis.

[0130] In an aspect, FACS can confirm the formation of dual-labeled connexosomes.

[0131] In an aspect, a disclosed method of evaluating gap junction formation can identify homotypic docking of hemichannels. In an aspect, a disclosed method of evaluating gap junction formation can identify homotypic docking of hemichannels. In an aspect, disclosed homotypic docking can comprise docking of two hemichannels having a single connexin isoform. In an aspect, a disclosed method of evaluating gap junction formation can identify heterotypic docking of hemichannels. In an aspect, a disclosed heterotypic docking can comprise docking of two hemichannels having a different connexin isoform.

[0132] In an aspect, a disclosed method of evaluating gap junction formation can further comprise performing whole-cell, dual-patch clamp analysis on a disclosed combined population of cells.

[0133] In an aspect, a disclosed method of evaluating gap junction formation can identify variation in the expression level of one or more disclosed connexin constructs. In an aspect, a disclosed method of evaluating gap junction formation can identify variation in trafficking of one or more disclosed connexin constructs. In an aspect, a disclosed method of evaluating gap junction formation can identify variation in stability of one or more disclosed connexin constructs. In an aspect, a disclosed method of evaluating gap junction formation can identify variation in the turnover rate of one or more disclosed connexin constructs.

[0134] In an aspect, a disclosed method of evaluating gap junction formation does not quantify hemichannel binding affinity.

[0135] In an aspect, a disclosed method of evaluating gap junction formation can detect dysfunctional gap junction formation and/or communication. In an aspect, a disclosed dysfunctional gap junction formation and/or communication can be due to non-conductive hemichannels. In an aspect, a disclosed dysfunctional gap junction formation and/or communication can be due to non-formation of hemichannels.

[0136] In an aspect of a disclosed method of evaluating gap junction formation, a disclosed FETCH score can reflect variation in (i) the expression level of the connexin constructs, (ii) the trafficking of the connexin constructs, (iii) the stability of the connexin constructs, and/or (iv) the turnover rate of the connexin constructs. In an aspect, a disclosed method of evaluating gap junction formation can be a downstream indicator of connexin hemichannel docking compatibility.

[0137] In an aspect, a disclosed method of evaluating gap junction formation can be scaled for high-throughput analysis.

[0138] In an aspect, a disclosed method of evaluating gap junction formation can evaluate one or more engineered connexin constructs for one or more new docking features. For example, in an aspect, an engineered connexin construct can comprise a modified CX23, CX25, CX26, CX30, CX30.2/CX31.3, CX30.3, CX31, CX31.1, CX31.9/CX30.2, CX32, CX36, CX37, CX40, CX40.1, CX43, CX45, CX46, CX47, CX50, CX59, CX62, or any combination thereof.

[0139] In an aspect, a disclosed method of evaluating gap junction formation can further comprise interrogating the docking interactions between connexins. In an aspect, a disclosed method can further comprise performing high-throughput quantification of gap junction hemichannel docking.

[0140] Disclosed herein is method of evaluating gap junction formation, the method comprising generating fluorescent connexosomes, wherein generating one or more fluorescent connexosomes comprises transfecting a first population of cells with a first fluorescently-labeled, C-terminally fused connexin construct; transfecting a second population of cells with a second fluorescently-labeled, C-terminally fused connexin construct; incubating the transfected populations of cells; trypsinizing the incubated and transfected population of cells; incubating the trypsinized first population of cells with the trypsinized second population of cells; trypsinizing the incubated combined population of cells, resuspending the trypsinized cells, and fixing the resuspended cells; and performing flow cytometry to track the fluorescent connexosomes by quantifying the fluorescence exchange between cells mediated by connexosomes.

[0141] In an aspect, a disclosed method of evaluating gap junction formation can further comprise treating a subject having a disease or disorder characterized by gap junction dysfunction and/or malfunction. In an aspect, gap junction dysfunction and/or malfunction can be confirmed by a disclosed method.

[0142] In an aspect, a disclosed method of evaluating gap junction formation can further comprise interrogating the docking interactions between connexins. In an aspect, a disclosed method of evaluating gap junction formation can further comprise high-throughput quantification of gap junction hemichannel docking. In an aspect, a disclosed method of evaluating gap junction formation can further comprise interrogating the docking interactions between connexins and high-throughput quantification of gap junction hemichannel docking.

[0143] In an aspect, a disclosed method of evaluating gap junction formation can use a disclosed automated pipeline that can receive and process FETCH data. A disclosed automated pipeline is described infra.

### 2. Methods of Interrogating the Docking Interactions Between Connexins

[0144] Disclosed herein is a method of interrogating the docking interactions between connexins, the method comprising performing flow enabled tracking of connexosomes in HEK293T cells (FETCH).

[0145] In an aspect, performing FETCH can comprises (i) generating fluorescent connexosomes, and (ii) using flow cytometry to track the fluorescent connexosomes in one or more cell samples. In an aspect, performing FETCH can comprise employing one or more plasmids listed in Table 3.

[0146] In an aspect, generating one or more fluorescent connexosomes can comprise transfecting a first population of cells with a first fluorescently-labeled, C-terminally fused connexin construct; and transfecting a second population of cells with a second fluorescently-labeled, C-terminally fused connexin construct.

[0147] In an aspect, a disclosed method of interrogating the docking interactions can employ one or more plasmids listed in Table 3. In an aspect, one or more disclosed plasmids can comprise any pair of fluorescent labels or fluorophores that is amendable to analysis via flow cytometry and have excitation and emission spectra that can be isolated or separated from each other, thereby enabling the interrogation of the docking interactions.

[0148] In an aspect, a disclosed fluorescent label or disclosed fluorophore can comprise enhanced green fluorescent protein (EGFP), mEmerald, enhanced yellow fluorescent protein (EYFP), mApple, TdTomato, mCherry, miRFP670, any known fluorescent label or tag, or any combination thereof. In an aspect, a disclosed fluorescent label or disclosed fluorophore can comprise any fluorescent label or fluorophore that is amendable to analysis via flow cytometry. In an aspect, a pair of disclosed fluorescent labels or disclosed fluorophores can comprise any pair of fluorescent labels or fluorophores that is amendable to analysis via flow cytometry and have excitation and emission spectra that can be isolated or separated from each other, thereby enabling the interrogation of the docking interactions. Fluorophores and fluorescent labels are known in the art.

[0149] In an aspect, a disclosed method can further comprise incubating the transfected populations of cells. In an aspect of a disclosed method, incubating the transfected populations of cells can comprise about 10 hours to about 24 hours. For example, in an aspect, incubating can comprise about 10 hrs, about 11 hrs, about 12 hrs, about 13 hrs, about 14 hrs, about 15 hrs, about 16 hrs, about 17 hrs, about 18 hrs, about 19 hours, about 20 hrs, about 21 hrs, about 22 hrs, about 23 hrs, or about 24 hours. In an aspect, incubating can comprise less than 10 hrs or more than 24 hrs. In an aspect, incubating the transfected populations of cells can comprises about 16 hours to about 18 hours.

[0150] In an aspect, a disclosed method can further comprise trypsinizing the incubated and transfected population of cells. Trypsinization, methods of trypsinization, and agents for trypsinizing are known to the art.

[0151] In an aspect, a disclosed method can further comprise incubating the trypsinized first population of cells with the trypsinized second population of cells. In an aspect of a disclosed method, incubating the combined populations of cells can comprise about 10 hours to about 30 hours. For example, in an aspect, incubating the combined populations of cells can comprise about 10 hrs, about 11 hrs, about 12 hrs, about 13 hrs, about 14 hrs, about 15 hrs, about 16 hrs, about 17 hrs, about 18 hrs, about 19 hours, about 20 hrs, about 21 hrs, about 22 hrs, about 23 hrs, about 24 hrs, about 25 hrs, about 26 hrs, about 27 hrs, about 28 hrs, about 29 hrs, or about 30 hrs. In an aspect, incubating the combined populations of cells can comprise less than 10 hrs or more than 30 hrs. In an aspect, incubating the combined populations of cells can comprise about 20 hrs. In an aspect of a disclosed method, incubating the combined populations of cells can continue to hyperdensity and/or over-confluency.

[0152] In an aspect, a disclosed method can comprise trypsinizing the incubated combined population of cells, resuspending the trypsinized cells, and fixing the resuspended cells. In an aspect, resuspending the trypsinized cells can comprise PBS and DNase. In an aspect of a disclosed method, fixing the resuspended cells can comprise paraformaldehyde. Methods of fixation and agents for fixation are known to the art.

[0153] In an aspect of a disclosed method, during flow cytometry, the cells can be analyzed in two selection gates prior to fluorescence evaluation.

[0154] In an aspect, analyzing the cells in two selection gates can comprises (i) identifying cells by evaluating sample forward vs. side scatter area; and (ii) identifying single cells by evaluating cells that maintained a linear correlation of forward scatter height to forward scatter area.

[0155] In an aspect, incubating the combined populations of cells can comprise further comprising generating one or more fluorescently-labeled, C-terminally fused connexin constructs. Isolated nucleic acid molecules comprising a nucleic acid sequence encoding a connexin protein are disclosed herein.

[0156] In an aspect, a disclosed first fluorescently-labeled, C-terminally fused connexin construct can comprise CX23, CX25, CX26, CX30, CX30.2/CX31.3, CX30.3, CX31, CX31.1, CX31.9/CX30.2, CX32, CX36, CX37, CX40, CX40.1, CX43, CX45, CX46, CX47, CX50, CX59, CX62, or a mutant thereof. In an aspect, a disclosed second fluorescently-labeled, C-terminally fused connexin construct can comprise CX23, CX25, CX26, CX30, CX30.2/CX31.3, CX30.3, CX31, CX31.1, CX31.9/CX30.2, CX32, CX36, CX37, CX40, CX40.1, CX43, CX45, CX46, CX47, CX50, CX59, CX62, or a mutant thereof.

[0157] In an aspect, a disclosed first connexin protein can comprise the sequence set forth in UniProtKB sequence P17302, Q9Y6H8, P35212, P36382, P48165, P57773, Q969M2, P08034, P29033, O75712, Q9NTQ9, O95377, O95452, Q6PEY0, P36383, Q5T442, Q8NFK1, Q9UKL4, Q8N144, Q96KN9, A6NN92, or a fragment thereof. In an aspect, a disclosed second connexin protein can comprise the sequence set forth in UniProtKB sequence P17302, Q9Y6H8, P35212, P36382, P48165, P57773, Q969M2, P08034, P29033, O75712, Q9NTQ9, O95377, O95452, Q6PEY0, P36383, Q5T442, Q8NFK1, Q9UKL4, Q8N144, Q96KN9, A6NN92, or a fragment thereof.

[0158] In an aspect, a disclosed first connexin protein can comprise the sequence set forth in any one of SEQ ID NO:01-SEQ ID NO:21, or a fragment thereof. In an aspect, a disclosed first connexin protein can comprise the sequence set forth in any sequence provided in Table 5. In an aspect, a disclosed second connexin protein can comprise the sequence set forth in any one of SEQ ID NO:01-SEQ ID NO:21, or a fragment thereof. In an aspect, a disclosed second connexin protein can comprise the sequence set forth in any sequence provided in Table 5.

[0159] In an aspect, a disclosed connexin construct can comprise a connexin suspected of having an etiological influence in a disease or disorder. In an aspect, a disclosed connexin construct can comprise a connexin confirmed to have an etiological influence in a disease or disorder.

[0160] In an aspect, flow cytometry can generate a fluorescent profile for each cell sample or each population of cells.

[0161] In an aspect, a disclosed fluorescence profile can comprise 4 quadrants. In an aspect, disclosed quadrants can comprise Q1, Q2, Q3, and Q4. In an aspect, a disclosed Q1 can represent a population of cells with the first fluorescently-labeled, C-terminally fused connexin construct. In an aspect, a disclosed Q2 can represent a population of cells expressing both the first fluorescently-labeled, C-terminally fused connexin construct and the second fluorescently-labeled C-terminally fused connexin construct. In an aspect, a disclosed Q3 can represent a population of cells with the second fluorescently-labeled C-terminally fused connexin construct. In an aspect, a disclosed Q4 can represent untransfected cells in either the first population of cells or the second populations of cells.

[0162] In an aspect, a disclosed method of interrogating the docking interactions between connexins can further comprise establishing a FETCH score.

[0163] In an aspect, a disclosed FETCH score can be a positive FETCH score or a negative FETCH score. In an aspect, a disclosed positive FETCH score can indicate a docking event. In an aspect, a disclosed negative FETCH score can indicate a non-docking event. In an aspect, a disclosed negative FETCH score can indicate dysfunctional gap junction intercellular communication. In an aspect, a disclosed FETCH score can comprise the proportion of dual colored-cells compared to fluorescent cells. In an aspect, a disclosed proportion can comprise Q2/(Q1+Q2+Q3).

[0164] In an aspect, a disclosed method of interrogating the docking interactions between connexins can comprise quantifying the fluorescence exchange between cells mediated by connexosomes. In an aspect, a disclosed method of interrogating the docking interactions between connexins can comprise confirming the relationship between the fluorescence exchange phenotype and the connexosome formation. In an aspect, confirming the relationship between the fluorescence exchange phenotype and connexosome formation can comprise using fluorescence-activated cell sorting (FACS) to collect cells from Q2 for microscopy analysis.

[0165] In an aspect, FACS can confirm the formation of dual-labeled connexosomes.

[0166] In an aspect, a disclosed method of interrogating the docking interactions between connexins can identify homotypic docking of hemichannels. In an aspect, a disclosed method of interrogating the docking interactions between connexins can identify homotypic docking of hemichannels. In an aspect, disclosed homotypic docking can comprise docking of two hemichannels having a single connexin isoform. In an aspect, a disclosed method of interrogating the docking interactions between connexins can identify heterotypic docking of hemichannels.

[0167] In an aspect, a disclosed heterotypic docking can comprise docking of two hemichannels having a different connexin isoform.

[0168] In an aspect, disclosed combinations of hemichannel combinations include the combinations set forth below in Table 2 (supra).

[0169] In an aspect, a disclosed method of interrogating the docking interactions between connexins can further comprise performing whole-cell, dual-patch clamp analysis on a disclosed combined population of cells. In an aspect, a disclosed method of interrogating the docking interactions between connexins can identify variation in the expression level of one or more disclosed connexin constructs. In an aspect, a disclosed method of interrogating the docking interactions between connexins can identify variation in trafficking of one or more disclosed connexin constructs. In an aspect, a disclosed method of interrogating the docking interactions between connexins can identify variation in stability of one or more disclosed connexin constructs. In an aspect, a disclosed method of interrogating the docking interactions between connexins can identify variation in the turnover rate of one or more disclosed connexin constructs.

[0170] In an aspect, a disclosed method of interrogating the docking interactions between connexins does not quantify hemichannel binding affinity.

[0171] In an aspect, a disclosed method of interrogating the docking interactions between connexins can detect dysfunctional gap junction formation and/or communication. In an aspect, a disclosed dysfunctional gap junction formation and/or communication can be due to non-conductive hemichannels. In an aspect, a disclosed dysfunctional gap junction formation and/or communication can be due to non-formation of hemichannels.

[0172] In an aspect of a disclosed method of interrogating the docking interactions between connexins, a disclosed FETCH score can reflect variation in (i) the expression level of the connexin constructs, (ii) the trafficking of the connexin constructs, (iii) the stability of the connexin constructs, and/or (iv) the turnover rate of the connexin constructs. In an aspect, a disclosed method of interrogating the docking interactions between connexins can be a downstream indicator of connexin hemichannel docking compatibility.

[0173] In an aspect, a disclosed method of interrogating the docking interactions between connexins can be scaled for high-throughput analysis.

[0174] In an aspect, a disclosed method of interrogating the docking interactions between connexins can evaluate one or more engineered connexin constructs for one or more new docking features. For example, in an aspect, an engineered connexin construct can comprise a modified CX23, CX25, CX26, CX30, CX30.2/CX31.3, CX30.3, CX31, CX31.1, CX31.9/CX30.2, CX32, CX36, CX37, CX40, CX40.1, CX43, CX45, CX46, CX47, CX50, CX59, CX62, or any combination thereof.

[0175] Disclosed herein is method of interrogating the docking interactions between connexins, the method comprising generating fluorescent connexosomes, wherein generating one or more fluorescent connexosomes comprises transfecting a first population of cells with a first fluorescently-labeled, C-terminally fused connexin construct; transfecting a second population of cells with a second fluorescently-labeled, C-terminally fused connexin construct; incubating the transfected populations of cells; trypsinizing the incubated and transfected population of cells; incubating the trypsinized first population of cells with the trypsinized second population of cells; trypsinizing the incubated combined population of cells, resuspending the trypsinized cells, and fixing the resuspended cells; and performing flow cytometry to track the fluorescent connexosomes by quantifying the fluorescence exchange between cells mediated by connexosomes.

[0176] In an aspect, a disclosed method of interrogating the docking interactions between connexins can further comprise treating a subject having a disease or disorder characterized by gap junction dysfunction and/or malfunction. In an aspect, gap junction dysfunction and/or malfunction can be confirmed by a disclosed method.

[0177] In an aspect, a disclosed method of interrogating the docking interactions can further comprise evaluating gap junction formation. In an aspect, a disclosed method of interrogating the docking interactions can further comprise high-throughput quantification of gap junction hemichannel docking. In an aspect, a disclosed method of interrogating the docking interactions can further comprise evaluating gap junction formation and high-throughput quantification of gap junction hemichannel docking.

[0178] In an aspect, a disclosed method of interrogating the docking interactions between connexins can use a disclosed automated pipeline that can receive and process FETCH data. A disclosed automated pipeline is described infra.

### 3. Methods of High-Throughput Quantification of Gap Junction Hemichannel Docking

[0179] Disclosed herein is a method of high throughput quantification of gap junction hemichannel docking, the method comprising performing flow enabled tracking of connexosomes in HEK293T cells (FETCH).

[0180] In an aspect, performing FETCH can comprises (i) generating fluorescent connexosomes, and (ii) using flow cytometry to track the fluorescent connexosomes in one or more cell samples.

[0181] In an aspect, generating one or more fluorescent connexosomes can comprise transfecting a first population of cells with a first fluorescently-labeled, C-terminally fused connexin construct; and transfecting a second population of cells with a second fluorescently-labeled, C-terminally fused connexin construct. In an aspect, performing FETCH can comprise employing one or more plasmids listed in Table 3.

[0182] In an aspect, a disclosed method of high throughput quantification of gap junction hemichannel docking can employ one or more plasmids listed in Table 3. In an aspect, one or more disclosed plasmids can comprise any pair of fluorescent labels or fluorophores that is amendable to analysis via flow cytometry and have excitation and emission spectra that can be isolated or separated from each other, thereby enabling the interrogation of the docking interactions.

[0183] In an aspect, a disclosed fluorescent label or disclosed fluorophore can comprise enhanced green fluorescent protein (EGFP), mEmerald, enhanced yellow fluorescent protein (EYFP), mApple, TdTomato, mCherry, miRFP670, any known fluorescent label or tag, or any combination thereof. In an aspect, a disclosed fluorescent label or disclosed fluorophore can comprise any fluorescent label or fluorophore that is amendable to analysis via flow cytometry. In an aspect, a pair of disclosed fluorescent labels or disclosed fluorophores can comprise any pair of fluorescent labels or fluorophores that is amendable to analysis via flow cytometry and have excitation and emission spectra that can be isolated or separated from each other, thereby enabling the interrogation of the docking interactions. Fluorophores and fluorescent labels are known in the art.

[0184] In an aspect, a disclosed method can further comprise incubating the transfected populations of cells. In an aspect of a disclosed method, incubating the transfected populations of cells can comprise about 10 hours to about 24 hours. For example, in an aspect, incubating can comprise about 10 hrs, about 11 hrs, about 12 hrs, about 13 hrs, about 14 hrs, about 15 hrs, about 16 hrs, about 17 hrs, about 18 hrs, about 19 hours, about 20 hrs, about 21 hrs, about 22 hrs, about 23 hrs, or about 24 hours. In an aspect, incubating can comprise less than 10 hrs or more than 24 hrs. In an aspect, incubating the transfected populations of cells can comprises about 16 hours to about 18 hours.

[0185] In an aspect, a disclosed method can further comprise trypsinizing the incubated and transfected population of cells. Trypsinization, methods of trypsinization, and agents for trypsinizing are known to the art.

[0186] In an aspect, a disclosed method can further comprise incubating the trypsinized first population of cells with the trypsinized second population of cells. In an aspect of a disclosed method, incubating the combined populations of cells can comprise about 10 hours to about 30 hours. For example, in an aspect, incubating the combined populations of cells can comprise about 10 hrs, about 11 hrs, about 12 hrs, about 13 hrs, about 14 hrs, about 15 hrs, about 16 hrs, about 17 hrs, about 18 hrs, about 19 hours, about 20 hrs, about 21 hrs, about 22 hrs, about 23 hrs, about 24 hrs, about 25 hrs, about 26 hrs, about 27 hrs, about 28 hrs, about 29 hrs, or about 30 hrs. In an aspect, incubating the combined populations of cells can comprise less than 10 hrs or more than 30 hrs. In an aspect, incubating the combined populations of cells can comprise about 20 hrs. In an aspect of a disclosed method, incubating the combined populations of cells can continue to hyperdensity and/or over-confluency.

[0187] In an aspect, a disclosed method can comprise trypsinizing the incubated combined population of cells, resuspending the trypsinized cells, and fixing the resuspended cells. In an aspect, resuspending the trypsinized cells can comprise PBS and DNase. In an aspect of a disclosed method, fixing the resuspended cells can comprise paraformaldehyde. Methods of fixation and agents for fixation are known to the art.

[0188] In an aspect of a disclosed method, during flow cytometry, the cells can be analyzed in two selection gates prior to fluorescence evaluation. In an aspect, analyzing the cells in two selection gates can comprises (i) identifying cells by evaluating sample forward vs. side scatter area; and (ii) identifying single cells by evaluating cells that maintained a linear correlation of forward scatter height to forward scatter area.

[0189] In an aspect, incubating the combined populations of cells can comprise further comprising generating one or more fluorescently-labeled, C-terminally fused connexin constructs. Isolated nucleic acid molecules comprising a nucleic acid sequence encoding a connexin protein are disclosed herein.

[0190] In an aspect, a disclosed first fluorescently-labeled, C-terminally fused connexin construct can comprise CX23, CX25, CX26, CX30, CX30.2/CX31.3, CX30.3, CX31, CX31.1, CX31.9/CX30.2, CX32, CX36, CX37, CX40, CX40.1, CX43, CX45, CX46, CX47, CX50, CX59, CX62, or a mutant thereof. In an aspect, a disclosed second fluorescently-labeled, C-terminally fused connexin construct can comprise CX23, CX25, CX26, CX30, CX30.2/CX31.3, CX30.3, CX31, CX31.1, CX31.9/CX30.2, CX32, CX36, CX37, CX40, CX40.1, CX43, CX45, CX46, CX47, CX50, CX59, CX62, or a mutant thereof.

[0191] In an aspect, a disclosed first connexin protein can comprise the sequence set forth in UniProtKB sequence P17302, Q9Y6H8, P35212, P36382, P48165, P57773, Q969M2, P08034, P29033, O75712, Q9NTQ9, O95377, O95452, Q6PEY0, P36383, Q5T442, Q8NFK1, Q9UKL4, Q8N144, Q96KN9, A6NN92, or a fragment thereof. In an aspect, a disclosed second connexin protein can comprise the sequence set forth in UniProtKB sequence P17302, Q9Y6H8, P35212, P36382, P48165, P57773, Q969M2, P08034, P29033, O75712, Q9NTQ9, O95377, O95452, Q6PEY0, P36383, Q5T442, Q8NFK1, Q9UKL4, Q8N144, Q96KN9, A6NN92, or a fragment thereof.

[0192] In an aspect, a disclosed first connexin protein can comprise the sequence set forth in any one of SEQ ID NO:01-SEQ ID NO:21, or a fragment thereof. In an aspect, a disclosed first connexin protein can comprise the sequence set forth in any sequence provided in Table 5. In an aspect, a disclosed second connexin protein can comprise the sequence set forth in any one of SEQ ID NO:01-SEQ ID NO:21, or a fragment thereof. In an aspect, a disclosed second connexin protein can comprise the sequence set forth in any sequence provided in Table 5.

[0193] In an aspect, a disclosed connexin construct can comprise a connexin suspected of having an etiological influence in a disease or disorder. In an aspect, a disclosed connexin construct can comprise a connexin confirmed to have an etiological influence in a disease or disorder.

[0194] In an aspect, flow cytometry can generate a fluorescent profile for each cell sample or each population of cells. In an aspect, a disclosed fluorescence profile can comprise 4 quadrants. In an aspect, disclosed quadrants can comprise Q1, Q2, Q3, and Q4. In an aspect, a disclosed Q1 can represent a population of cells with the first fluorescently-labeled, C-terminally fused connexin construct. In an aspect, a disclosed Q2 can represent a population of cells expressing both the first fluorescently-labeled, C-terminally fused connexin construct and the second fluorescently-labeled C-terminally fused connexin construct. In an aspect, a disclosed Q3 can represent a population of cells with the second fluorescently-labeled C-terminally fused connexin construct. In an aspect, a disclosed Q4 can represent untransfected cells in either the first population of cells or the second populations of cells.

[0195] In an aspect, a disclosed method of high throughput quantification of gap junction hemichannel docking can further comprise establishing a FETCH score. In an aspect, a disclosed FETCH score can be a positive FETCH score or a negative FETCH score. In an aspect, a disclosed positive FETCH score can indicate a docking event. In an aspect, a disclosed negative FETCH score can indicate a non-docking event. In an aspect, a disclosed negative FETCH score can indicate dysfunctional gap junction intercellular communication. In an aspect, a disclosed FETCH score can comprise the proportion of dual colored-cells compared to fluorescent cells.

[0196] In an aspect, a disclosed proportion can comprise Q2/(Q1+Q2+Q3).

[0197] In an aspect, a disclosed method of high throughput quantification of gap junction hemichannel docking can comprise quantifying the fluorescence exchange between cells mediated by connexosomes.

[0198] In an aspect, a disclosed method of high throughput quantification of gap junction hemichannel docking can comprise confirming the relationship between the fluorescence exchange phenotype and the connexosome formation.

[0199] In an aspect, confirming the relationship between the fluorescence exchange phenotype and connexosome formation can comprise using fluorescence-activated cell sorting (FACS) to collect cells from Q2 for microscopy analysis. In an aspect, FACS can confirm the formation of dual-labeled connexosomes.

[0200] In an aspect, a disclosed method of high throughput quantification of gap junction hemichannel docking can identify homotypic docking of hemichannels. In an aspect, a disclosed method of high throughput quantification of gap junction hemichannel docking can identify homotypic docking of hemichannels. In an aspect, disclosed homotypic docking can comprise docking of two hemichannels having a single connexin isoform. In an aspect, a disclosed method of high throughput quantification of gap junction hemichannel docking can identify heterotypic docking of hemichannels. In an aspect, a disclosed heterotypic docking can comprise docking of two hemichannels having a different connexin isoform.

[0201] In an aspect, disclosed combinations of hemichannel combinations include the combinations set forth below in Table 2 (supra).

[0202] In an aspect, a disclosed method of high throughput quantification of gap junction hemichannel docking can further comprise performing whole-cell, dual-patch clamp analysis on a disclosed combined population of cells.

[0203] In an aspect, a disclosed method of high throughput quantification of gap junction hemichannel docking can identify variation in the expression level of one or more disclosed connexin constructs. In an aspect, a disclosed method of high throughput quantification of gap junction hemichannel docking can identify variation in trafficking of one or more disclosed connexin constructs. In an aspect, a disclosed method of high throughput quantification of gap junction hemichannel docking can identify variation in stability of one or more disclosed connexin constructs. In an aspect, a disclosed method of high throughput quantification of gap junction hemichannel docking can identify variation in the turnover rate of one or more disclosed connexin constructs.

[0204] In an aspect, a disclosed method of high throughput quantification of gap junction hemichannel docking does not quantify hemichannel binding affinity.

[0205] In an aspect, a disclosed method of high throughput quantification of gap junction hemichannel docking can detect dysfunctional gap junction formation and/or communication. In an aspect, a disclosed dysfunctional gap junction formation and/or communication can be due to non-conductive hemichannels. In an aspect, a disclosed dysfunctional gap junction formation and/or communication can be due to non-formation of hemichannels.

[0206] In an aspect of a disclosed method of high throughput quantification of gap junction hemichannel docking, a disclosed FETCH score can reflect variation in (i) the expression level of the connexin constructs, (ii) the trafficking of the connexin constructs, (iii) the stability of the connexin constructs, and/or (iv) the turnover rate of the connexin constructs.

[0207] In an aspect, a disclosed method of high throughput quantification of gap junction hemichannel docking can be a downstream indicator of connexin hemichannel docking compatibility.

[0208] In an aspect, a disclosed method of high throughput quantification of gap junction hemichannel docking can be scaled for high-throughput analysis.

[0209] In an aspect, a disclosed method of high-throughput quantification of gap junction hemichannel docking can evaluate one or more engineered connexin constructs for one or more new docking features. For example, in an aspect, an engineered connexin construct can comprise a modified CX23, CX25, CX26, CX30, CX30.2/CX31.3, CX30.3, CX31, CX31.1, CX31.9/CX30.2, CX32, CX36, CX37, CX40, CX40.1, CX43, CX45, CX46, CX47, CX50, CX59, CX62, or any combination thereof.

[0210] Disclosed herein is a method of high-throughput quantification of gap junction hemichannel docking, the method comprising generating fluorescent connexosomes, wherein generating one or more fluorescent connexosomes comprises transfecting a first population of cells with a first fluorescently-labeled, C-terminally fused connexin construct; transfecting a second population of cells with a second fluorescently-labeled, C-terminally fused connexin construct; incubating the transfected populations of cells; trypsinizing the incubated and transfected population of cells; incubating the trypsinized first population of cells with the trypsinized second population of cells; trypsinizing the incubated combined population of cells, resuspending the trypsinized cells, and fixing the resuspended cells; and performing flow cytometry to track the fluorescent connexosomes by quantifying the fluorescence exchange between cells mediated by connexosomes.

[0211] In an aspect, a disclosed method of high-throughput quantification of gap junction hemichannel docking can further comprise treating a subject having a disease or disorder characterized by gap junction dysfunction and/or malfunction. In an aspect, gap junction dysfunction and/or malfunction can be confirmed by a disclosed method.

[0212] In an aspect, a disclosed method of high-throughput quantification of gap junction hemichannel docking can further comprise evaluating gap junction formation. In an aspect, a disclosed method of high-throughput quantification of gap junction hemichannel docking can further comprise interrogating the docking interactions between connexins. In an aspect, a disclosed method of high-throughput quantification of gap junction hemichannel docking can further comprise evaluating gap junction formation and interrogating the docking interactions between connexins.

[0213] In an aspect, a disclosed method of evaluating gap junction formation can use a disclosed automated pipeline that can receive and process FETCH data. A disclosed automated pipeline is described infra.

### EXAMPLES

[0214] Here, a new method called FETCH was developed. FETCH is the first of its kind in specifically interrogating the docking interactions of different Cx isoforms and mutant proteins. FETCH makes strides over traditional methods by enabling the direct, high-throughput, low-skill, and fast analyses, which ultimately allows for the dissection and manipulation of complex interactions throughout the body.

[0215] As described herein, FETCH (flow enabled tracking of connexosomes in HEK cells) is a method that utilizes the generation of annular gap junctions (connexosomes) as downstream indicators of connexin hemichannel docking compatibility. First, the data show that fluorescent connexosomes create a cellular phenotype that is detectable by flow cytometry. Second, the data show that FETCH identifies homotypic and heterotypic docking of many single isoform connexin hemichannels. Third, the data show that FETCH captures the impact of disease-relevant connexin protein mutations on gap junction formation. Collectively, the data demonstrate the development of a new flow cytometry-based method that is amenable to the high-throughput classification of gap junction hemichannel docking.

[0216] The Examples that follow are illustrative of specific aspects of the invention, and various uses thereof. They set forth for explanatory purposes only and are not to be taken as limiting the invention.

### A. MATERIALS AND METHODS EMPLOYED IN SPECIFIC EXAMPLES

### 1. Construct Cloning and Preparation

[0217] Connexin gene information was procured from the National Center for Biotechnology Information (NCBI, ncbi.nlm.nih.gov) and the Ensembl genome browser (ensembl.org). The human codon-optimized genes were ordered from Integrated DNA Technology (IDT, idtdna.com). Genes were subcloned into Emerald-N1 (addgene:53976), piRFP670-N1 (addgene: 45457) and Apple-N1 (addgene: 54567) vectors using In-Fusion cloning (takarabio.com), resulting in connexin fluorescent fusion proteins, specifically with the fluorescent proteins being adjoined to the connexin carboxy-terminus. Previous studies have indicated that carboxy-terminal tagging of connexin proteins is less likely to cause functional perturbations than amino-terminal tagging (Contreras J E, et al. (2003) Proc Natl Acad Sci USA. 100:11388-11393).

[0218] Mutant constructs were generated using overlapping primers within standard Phusion polymerase, PCR amplifications to facilitate site-directed mutagenesis.

TABLE 4
Primers Listing in Sequence Listing.

| SEQ ID NO: | Primer Description |
|---|---|
| 87 | Cx43-S18P-top primer |
| 88 | Cx43-S18P-bot primer |
| 89 | Cx43-A40V-top primer |
| 90 | Cx43-A40V-bot primer |
| 91 | Cx43-N55D-top primer |
| 92 | Cx43-N55D-bot primer |
| 93 | Cx43-Q58H-top primer |
| 94 | Cx43-Q58H-bot primer |
| 95 | Cx43-P59A-top primer |
| 96 | Cx43-P59A-bot primer |
| 97 | Cx43-S69Y-top primer |
| 98 | Cx43-S69Y-bot primer |
| 99 | Cx43-F70A-top primer |
| 100 | Cx43-F70A-bot primer |
| 101 | Cx43-I130T-top primer |
| 102 | Cx43-I130T-bot primer |
| 103 | Cx43-F179A-top primer |
| 104 | Cx43-F179A-bot primer |
| 105 | Cx43-S182A-top primer |
| 106 | Cx43-S182A-bot primer |
| 107 | Cx43-V184A-top primer |
| 108 | Cx43-V184A-bot primer |
| 109 | Cx43-D190A-top primer |
| 110 | Cx43-D190A-bot primer |
| 111 | Cx43-H194A-top primer |
| 112 | Cx43-H194A-bot primer |
| 113 | Cx43-R202H-top primer |
| 114 | Cx43-R202H-bot primer |
| 115 | Cx43-V216L-top primer |
| 116 | Cx43-V216L-bot primer |

### 2. Cell Culture

[0219] HEK 293FT cells were purchased from Thermo Fisher Scientific (cat #R70007) and were maintained according to manufacturer's instructions. Cultures were grown in 10 cm tissue culture treated dishes in high-glucose DMEM (Sigma Aldrich, D5796) supplemented with 6 mM L-glutamine, 0.1 mM MEM non-essential amino acids, and 1 mM MEM sodium pyruvate in a 5% CO₂, 37° C. incubator. Cells were passaged via trypsinization every 2-3 days or until 60-80% confluency was reached.

### 3. Transient Transfection:

[0220] HEK 293FT cells were plated in 10 μg/mL fibronectin coated multi-well dishes to achieve ˜75% confluency after overnight incubation. For transfection, DNA was combined with polyethylenimine (PEI) diluted in Opti-MEM in a 1:3 ratio (μg of DNA:μL of PEI) and incubated at room temperature for 10 min. Following incubation, PEI-DNA complexes were added dropwise to wells of plated cells. Treated cells were then incubated at 37° C. for 16-18 hrs, followed by media change. Expression of the connexin-FP constructs was evaluated at 24 hrs and 48 hrs post-transfection via widefield or confocal microscopy and western blotting.

### 4. Confocal Imaging Analysis

[0221] For imaging, HEK 293FT were plated in 10 μg/mL fibronectin coated 35 mm, glass-bottom Mattek dishes (cat #P35GC-1.5-14-C). Cells were transiently transfected using PEI as described above and imaged at ˜48 hrs post-transfection. Images were acquired on a Leica SP5 laser point scanning inverted confocal microscope using Argon/2, HeNe 594 nm and HeNe633 nm lasers, conventional fluorescence filters and a 63X, HCX PL APO W Corr CS, NA: 1.2, Water, DIC, WD: 0.22 mm, objective. Images were taken with 1024×1024 pixel resolution at 200 Hz frame rate.

### 5. Cell Lysate Preparation and Western Blotting

[0222] To extract cell lysates, plated cells were washed twice with room temperature PBS, trypsinized, collected, and centrifuged at 2,000×g for 5 minutes. Pellets were washed twice with PBS followed by centrifugation and aspiration. Pellets were lysed by the addition of 10 mM Tris, pH 8.0, 1 mM EDTA, 1% SDS, and 1× protease and phosphatase inhibitor cocktail (Thermo) and sonicated. Lysates were quantified via detergent compatible Bradford assay (ThermoFisher). For western blot, samples were separated using gel electrophoresis on 4-20% SDS-Page gels. Separated proteins were transferred to PVDF membrane in transfer buffer (25 mM Tris, 190 mM glycine, 20% methanol, final pH 8.3), for 1 hr at 110 V. Subsequently, membranes were blocked in 5% milk for 1 hr, followed by 1 hr incubation with primary antibody (1:1000) in 5% milk with shaking. Blots were then washed three times with TBST (20 mM Tris, pH 7.5, 150 mM NaCl and 0.1% Tween 20) for 5 minutes and incubated with Horse radish peroxidase conjugated secondary antibody (1:5000), followed by three washes with TBST for 5 minutes. Blots were developed using Optiblot ECL kit (Abcam) and visualized via Azure c300 phosphorimager. To re-stain individual blots for different proteins, blots were stripped with mild stripping buffer (200 mM glycine, 0.1% w/v SDS, 1% Tween 200), 2×10-minute washes with shaking, followed by 2×10-minute PBS washes with shaking and 2×5-minute TBST washes with shaking. After stripping, blots were blocked in 5% milk for 1 hr in preparation for antibody staining as previously described.

### 6. Flow Enabled Tracking of Connexosomes in HEK 293FT Cells (FETCH)

[0223] FETCH analysis is fundamentally a two-component system. To complete FETCH analysis, replica multi-well plates were transfected with either of the two components being evaluated. The media of transfected wells was changed 16-18 hrs post-transfection and cells were trypsinized and experimental counterparts were combined at ˜20 hrs post-transfection. The entirety of combined samples were then plated onto new, 10 μg/mL Fibronectin coated wells of the same size, resulting in hyperdensity and over confluency. Following co-plating, samples were incubated for ˜20 hr-24 hrs, at which point samples were trypsinized, resuspended in phosphate buffered saline with 10 U/mL DNAse and fixed with paraformaldehyde (f/c of 1.5%). Co-plated samples in 96 well plates were resuspended to a final volume of ˜150 μL, samples from 24-well plates were resuspended to a final volume of ˜600 μL.

[0224] Flow cytometry data was collected on either a BD FACSCanto II (2-color experiments and high-throughput 96-well plates; 488 nm and 633 nm lasers), which utilizes the BD FACSDiVa software. Samples were analyzed in two selection gates prior to their fluorescence evaluation. First, presumable HEK cells were identified by evaluating sample forward vs side scatter area. Next, single cells were selected by evaluating cells that maintained a linear correlation of forward scatter height to forward scatter area. Finally, the fluorescence profiles of each sample were generated.

### 7. Fetch Automated Gating Pipeline

[0225] Each FETCH experiment produces “*.fcs” files that contain all the channel data for fluorescence in the sample. The automated pipeline loads these files, extracts FSC-A, SSC-A, and FSC-H. Depending on the machine used, green channel was loaded as 1-A or as FITC-A. For the red channel, both APC-A (RFP670) with PE-A (mApple) can be used or 5-A(RFP670) can be used. Next, the code produces two matrices containing SSC-A with FSC-A, and FSC-A with FSC-H, respectively.

[0226] The first gate is drawn on the FSC-A vs SSC-A axes to exclude cellular debris which clusters in the lower left corner and the cells that are saturating the laser (at the max of both axes). On an FSC-A vs SSC-A plot, the cellular debris usually is smoothly transitioning into the population of intact cells, therefore a Gaussian kernel density estimator with the estimator bandwidth selection defined by the Scott's Rule is used to draw contours around the data in SSC-A vs FSC-A matrix. Next, a set of heuristics was used to determine which of the contour lines should be used to define the first gate. Specifically, cellular debris usually clusters below 25000 on both axes, so any contour that includes values at or below is excluded. Similarly, any contour within a 1000 of the maximum value of each axis is also excluded. Of the remaining contours, the largest one is chosen, and an oval equation is fitted to the points defining that contour to attenuate occasional protrusions of the contour that tap into cellular debris population in rare cases. The fitted oval becomes the first gate.

[0227] For all the elements inside of the first gate, a second gate was drawn in the axis of FSC-A and FSC-H to exclude non-single cells. For the second gate, a line was fit to all the points. Next, for each point, a norm to the fit line was found and a standard deviation of all such norms was found. Using this standard deviation, a second gate 4 standard deviations away from the fitted line was defined on both sides and excluded all the points outside of this gate.

[0228] Upon applying the first two gates, the data was finally plotted with the red fluorophore on the y axis and the green fluorophore on the x axis. If a sample contained more than two fluorophores, then the last gate was drawn for each possible combination. Since some readings are below zero due to fluorescence compensation, all the data points were shifted by the smallest value along both axes and then a natural log of fluorescence levels was taken. To achieve the optimal bandwidth for the kernel density estimation, a cross validation grid search algorithm was run on the points in the log space. A gaussian kernel density with the bandwidth estimated to obtain density contours was fit.

[0229] For properly expressing samples, the expectations were as follows: (1) a large population of untransfected cells in the bottom left quadrant of the plot, (2) a population of cells strongly-expressing red fluorophore along the y axis, and (3) a population of cells strongly expressing green fluorophore along the x axis. Autofluorescence was expected to not exceed 500 on either axis, so the untransfected population was defined to be below this value along both axes. To draw a tighter bound of the untransfected population, the first contour whose mean kde value is at or above the 60th quantile (identified as a generalizable heuristic value) of the distribution of kde values within the largest contour which is at or below the autofluorescence cutoff was chosen. The top-most point of the tight contour defined the horizontal gate and the right-most point—the vertical gate, separating the plot into four quadrants.

[0230] The upper left quadrant Q1 corresponds to the cells expressing just the red fluorophore, the upper right quadrant Q2 represents dual-colored cells, the lower right quadrant Q3 shows the cells expressing just the green fluorophore, and the lower left quadrant Q4 represents untransfected population. FETCH score was defined as the proportion of dual-colored cells to all transfected cells: Q2/(Q1+Q2+Q3).

[0231] Expecting approximately equal expression levels of each fluorophore, if the number of cells in Q1 is two or more times larger/smaller than the number of cells in Q3, then the FETCH score was classified as “dubious” and marked accordingly in the output table. The “dubious” label was also given to samples that have less than 500 cells total after the application of the second gate and to the samples that failed at any of the steps in the pipeline (usually due to poor expression or the absence of cells in the sample).

8. Fluorescence Recovery after Photobleaching (FRAP) Analysis:

[0232] For FRAP analysis, HEK 293FT cells were plated into 10 μg/mL fibronectin coated mattek glass-bottom dishes (MatTek Corporation, cat #: P35G-1.5-14-C) to achieve ˜75% confluency after overnight incubation. Dishes were then transfected with connexin constructs and allowed to incubate overnight. After 16 hrs-18 hrs, transfection media was replaced with fresh media and FRAP was initiated at ˜24 hrs post-transfection. For FRAP, 1 μg/mL Calcein-AM (Enzo Life Sciences, cat #: 52002) was added to dishes, incubated at 39° C., 5% CO₂ for 30 minutes and then aspirated. Dishes were rinsed 3 times with phosphate buffered saline and then imaged in Tyrode's Solution (Alfa Aesar, cat #:J67593-AP).

[0233] Imaging was completed on a Leica SP5 confocal microscope using the LAS Software FRAP Wizard. The experimental program centered on imaging with a 63× water immersion objective, 512×512 Hz and staging pre-bleach (10 frames, 1.29 s/f), bleach (30 frames, 1.29 s/f) and recovery (24 frames, 10 s/f) imaging intervals. For bleaching conditions, the Argon laser was set to 20% power and full power was used to bleach a selected cell ROI. Cells expressing the connexin construct of interest were selected for bleaching if they were surrounded by at least 3 cells making clear contacts and also clearly expressing the exogenous construct as determined by fluorescence.

[0234] FRAP images were analyzed using a custom written FIJI plugin and python script. Using a semi-automatic FIJI plugin, 2 ROIs were drawn: one around the bleached cell, and the other—around a cell that did not get bleached. Raw fluorescence was extracted from those and saved into a file for each frame in a stack. Files were then processed using the custom python script, first normalizing the fluorescence of the bleached cell to the fluorescence of the unbleached cell for each frame, and then calculating the percent fluorescence of the baseline by dividing the resultant value by the mean corrected value of the pre-bleaching frames. Since many mutants exhibited low to no fluorescence recovery, it was impossible to fit a reasonable exponential curve to them, impeding the calculation of time constant and similar fitted metrics. Instead, the percent of the baseline value at the end of an imaging experiment was used for statistical analysis.

### B. SPECIFIC EXAMPLES

### Example 1

[0235] Dual Fluorescently-Labeled Connexosomes were Detected by Flow Cytometry

[0236] Connexosomes are cytoplasmic, double-bilayer vesicular structures comprised of tens to thousands of fully-docked gap junction channels that have been internalized from gap junction plaques (Jordan K, et al. (2001) J Cell Sci. 114:763-773). As connexosomes are the direct products of gap junction turnover, it was reasoned that they could be used as indicators of gap junction docking and, by extension, as indicators of the compatibility of connexin hemichannels.

[0237] Connexin43 (Cx43) is one of the best characterized connexin isoforms, and C-terminally fused fluorescent Cx43 constructs were among the first used to observe and characterize the dynamic features of connexosomes including internalization rate, vesicular sizes, and cellular fates (Gaietta G, et al. (2002) Science. 296:503-507; Jordan K, et al. (2001) J Cell Sci. 114:763-773; Piehl M, et al. (2007) Mol Biol Cell. 18:337-347). Thus, two-color, fluorescent connexosomes of Cx43 were generated and the feasibility of high-throughput connexosome identification in cells was determined.

[0238] Previous studies have evaluated endogenous connexosomes in native tissues and cells, such as membrana granulosa cells of the rabbit ovarian follicle (Espey L L, et al. (1972) Biol Reprod. 6:168-175; Larsen W J. (1978) Tissue Cell. 10:585-598; Larsen W J, et al. (1981) Biol Reprod. 25:1119-1134; Albertini D F, et al. (1975) Tissue Cell. 7:389-405), guinea pig epithelia (Archard H, et al. (1979) J Oral Path. 8(4):187-197), or the adrenocortical tumor cell line (SW-13) (Murray S A, et al. (1981) Cancer Res. 41:4063-4074; Murray S A, et al. (2004) Endocr Res. 30:647-654; Bell C L, et al. (2019a) Int J Mol Sci. 20(1):44), or as products of exogenous construct expression in HeLa cells (Fong J T, et al. (2012) Autophagy. 8:794-811; Gaietta G, et al. (2002) Science. 296:503-507; Piehl M, et al. (2007) Mol Biol Cell. 18:337-347) or normal rat kidney (NRK) cells (Jordan K, et al. (2001) J Cell Sci. 114:763-773). The HEK 293FT cell line (ThermoFisher) was selected for these studies as HEK 293T cells had substantially higher protein expression and larger gap junction plaque sizes when compared to HeLa and other HEK derivative cell lines. (FIG. 7A-FIG. 7B).

[0239] To generate two-color connexosomes and characterize them using microscopy, separate populations of cells were transfected with one of two fluorescently labeled, C-terminally fused Cx43 constructs (i.e., either Cx43-mEmerald or Cx43-mApple). Following an initial incubation, transfected cells were trypsinized, co-plated, and incubated together for-18 hours prior to analysis (FIG. 2A). Transfection of HEK 293FTs with fluorescently-tagged Cx43 constructs resulted in the generation of connexosomes. Specifically, when co-plated Cx43-mEmerald and Cx43-mApple expressing cells were examined, junctional plaques with dual-fluorescent co-localized invaginations were observed. This is indicative of active connexosome formation and the dual-fluorescent vesicular structures were consistent with connexosomes (FIG. 2B) (Piehl M, et al. (2007) Mol Biol Cell. 18:337-347). In contrast, co-plated cells expressing cytoplasmic fluorescent proteins did not generate fluorescently labeled vesicles or plaque structures (FIG. 2B).

[0240] Flow cytometry generates multi-wavelength fluorescence profiles of individual cells within a given population. Thus, it was reasoned that this analysis could be used to quantify fluorescence exchange between cells mediated by connexosomes in a high-throughput fashion. This novel approach is called flow enabled tracking of connexosomes in HEK 293FT cells (FETCH). For FETCH analyses, two-color connexosomes were generated as described previously. But instead of imaging, cells were trypsinized and fixed in suspension for evaluation by flow cytometry. As a control, samples of co-plated cells expressing cytoplasmic mEmerald and mApple were analyzed as well.

[0241] Upon generation of cellular fluorescence profiles by flow cytometry, a significant phenotypic difference between samples that generated connexosomes (i.e., Cx43-fluorescent protein) and those that did not (i.e., cytoplasmic fluorescent protein) emerged. For both samples, subpopulations of untransfected cells, mApple-labeled cells, and mEmerald-labeled cells were clearly identifiable (FIG. 2C—Q4 (bottom left), Q1 (upper left), and Q3 (bottom right), respectively). But for the Cx43-mEmerald/Cx43-mApple sample, a significant proportion of cells exhibited both green and red fluorescence (FIG. 2C, right panel, Q2 (upper right)). This unique double-positive or dual-fluorescent phenotype was characterized by symmetrical population shifts from the single-expressing quadrants (meaning, specifically, cells highly expressing Cx43-mEmerald gained Cx43-mApple fluorescence and cells highly expressing Cx43-mApple gained Cx43-mEmerald fluorescence). Importantly, acquisition of the secondary fluorescent construct was commensurate with but not equal to the primary fluorescent construct. These observations were consistent with fluorescence exchange mediated by connexosomes.

[0242] To confirm the relationship between the fluorescence exchange phenotype of the Cx43-mEmerald/Cx43-mApple sample and connexosome formation, fluorescence-activated cell sorting (FACS) was used to collect cells from each subpopulation of the +/+ quadrant for microscopy analysis. Confocal imaging of the FACS sorted double-positive cells revealed dual-labeled vesicles consistent with connexosomes (FIG. 2D). Moreover, the configuration of fluorescent labels of the connexosomes was such that the expressed, primary construct labeled the outer surface of the connexosome and the acquired, internalized construct was on the interior. This pattern was observed for both Cx43-mEmerald and Cx43-mApple expressing cells. Though post-sorted cells showed significant amounts of vesicular structures that were single-labeled (likely representing transport vesicles and internalized hemi-plaques), no single-labeled vesicles of secondary fluorescent constructs were observed. This finding indicates that the dual-labeled vesicles were connexosomes and that connexosomes generated the observed fluorescence phenotype. Overall, these results demonstrated that FETCH could be used to capture the fluorescence exchange between cells, mediated by connexosomes, and indicative of gap junction docking.

### Example 2

### FETCH Evaluated Docking Interactions of Numerous Connexin Protein Isoforms

[0243] As the docking principles that generate annular gap junctions are common to all connexin proteins, it was reasoned that connexin isoforms with documented participation in homotypic gap junctions would be amenable to FETCH analysis. To standardize the quantification of fluorescence exchange, a metric was established. This metric—known as the FETCH score—represents the proportion of the +/+ quadrant cells, adjusted for total fluorescent events, minimizing the influence of transfection efficiency variability on results. Known positive and negative FETCH score distributions representative of non-docking combinations were generated for statistical comparison.

[0244] To generate a positive distribution, samples of homotypic pairings of Cx43-FPs with varied DNA transfection quantities and co-plated population densities to capture physical condition variabilities (i.e., small volume pipetting error during transfection and co-plating) were evaluated. Additionally, homotypic pairings of Connexin36 (Cx36)-FPs, a neuronal connexin isoform that forms homotypic gap junctions (Deans M R, et al. (2002) Neuron. 36:703-712; Rash J E, et al. (2001) Cell Commun Adhes. 8:315-320), were evaluated. (FIG. 3A, FIG. 8B).

[0245] The negative distribution was comprised of samples of co-plated cytoplasmic fluorescent protein (FP) expressing cells (i.e., mEmerald with mRFP670) and samples of co-plated cells expressing Cx43-FP and cytoplasmic FP (i.e., Cx43-GFP with cytoplasmic RFP).

[0246] Additionally, samples of non-docking combinations of different Cx isoforms were evaluated. Specifically, co-plated cells expressing Cx43-FP with cells expressing Cx36-FP (in heterotypic combination) and cells expressing Cx23-FP (homotypically) (FIG. 3A, FIG. 8B). Though Cx36 and Cx43 individually form homotypic gap junctions in the mammalian nervous system, they have not been reported to form heterotypic channels and Cx23 fails to form docked gap junctions due to a missing EL disulfide bond (Sonntag S, et al. (2009) Eur J Cell Biol. 88:65-77).

[0247] To evaluate the docking ability of other Cx family members using FETCH, mEmerald and RFP670 C-terminal fusion constructs of the 18 remaining connexin isoforms were generated and subjected to a complete homotypic FETCH analyses. FETCH scores for many Cx isoforms were significantly higher than the distribution for negative docking conditions, indicating that most isoforms are amenable to FETCH analysis. The observed variability in these FETCH scores likely reflected isoform specific characteristics (e.g., expression level, trafficking, stabilization, and turnover rate).

[0248] Using an independent two-sample t-test with FDR correction, it was determined that Cx25, Cx31.1, Cx31.3, Cx31.9, Cx46, Cx50, Cx59, and Cx62 failed to generate a significant homotypic FETCH score consistent with docking (FIG. 3B).

[0249] Next, to validate the specificity of FETCH in capturing compatible docking interactions, select Cx isoforms were tested for heterotypic interactions. Connexin isoforms are classified by sequence homology into 5 groups (alpha (A), beta (B), gamma (C), delta (D), epsilon (E)) (Beyer E C, et al. (2009). The family of connexin genes. In Connexins (pp. 3-26). Humana Press). Some connexin isoforms can form heterotypic (two-type) channels, frequently with other isoforms within the same homology class, and with some exceptions, isoforms in different classes are not as widely compatible for heterotypic docking (Harris AL (2001) Q Rev Biophys. 34(3):325; Koval M, et al. (2014) Febs Letters. 588:1193-1204). Thus, a heterotypic FETCH evaluation was performed with well-characterized representatives of each major class of connexin. Specifically, in addition to Cx43, also chosen were Cx26, Cx32, Cx45, and Cx36 as representatives to evaluate heterotypic, combinatorial pairings. Importantly, each of these representatives exhibited significantly positive FETCH scores in homotypic evaluations.

[0250] Both Cx26 and Cx32 reportedly failed to form functional heterotypic gap junctions with Cx43 in Xenopus laevis oocyte experiments (White T, et al. (1995) Mol Biol Cell. 6(4):459-470). On the other hand, Cx45 is frequently co-expressed in the same tissues as Cx43 and has been formed Cx43/Cx45 heterotypic channels (Moreno A P, et al. (1995) Prog Cell Res. 4:405-408).

[0251] When the completed heterotypic FETCH on all combinations of the subset of isoforms was completed, the results showed that the most cross-class heterotypic connexin combinations yielded negative FETCH scores, reflecting docking incompatibility (FIG. 3C). Using independent two-sample t-tests with FDR correction, the FETCH scores were used to determine statistical significance. Consistent with expectations, FETCH analysis revealed that Cx26, Cx32, and Cx36 failed to dock with Cx43, while Cx45 showed a positive FETCH score when paired with Cx43 (n=7, z=18.33, p=2.3×10⁻¹¹) (FIG. 3C).

[0252] In addition to the Cx43/Cx45 pairing, a positive FETCH score was observed when pairing Cx26 with Cx32 (n=6, z=29.30, p=8.7×10⁻¹⁶), which belong to the same class, have homologous extracellular loop docking motifs, and have also been reported to form functional heterotypic gap junctions (Barrio L C, et al. Proc Natl Acad Sci USA. 88:8410-8414; Gong X Q, et al. (2013) J Cell Sci. 126:3113-3120) (FIG. 3C).

[0253] Interestingly, a positive FETCH score was observed when pairing Cx26 and Cx36 (n=5, z=9.03, p=0.013). This is an unreported pairing that can represent a newly discovered functional compatibility. These results demonstrate that the FETCH method captured physiological gap junction formation and can be applied to broader evaluations of other connexin isoforms in diverse and uncharacterized combinations.

### Example 3

### FETCH Captured Functional Docking of Disease Relevant Connexin Mutant Proteins

[0254] Cx43 is the most ubiquitously expressed connexin in the body with critical, tissue-specific functions in nearly 40 tissues and organs including the heart, brain, liver and skin. Unsurprisingly, mutations in the GJA1 gene, which encodes Cx43, often result in numerous, systemic physiological perturbations. The majority of Cx43 disease-associated mutations result in the complex developmental disorder, Oculodentodigital dysplasia (ODDD) (Paznekas W A, et al. (2003) Am J Hum Genet. 72:408-418; Laird D W (2014) Febs Letters. 588:1339-1348), which is characterized by congenital craniofacial, limb and digital deformities, teeth and eye anomalies, and neurological dysfunction (De Bock M, et al. (2013) Front Pharmacol. 4:120).

[0255] To further expand upon the capabilities of the FETCH method in identifying connexin docking interactions, 10 single amino acid mutations of Cx43 that are associated with the syndromic disease were selected to evaluate for homotypic and heterotypic (against WT-Cx43) docking. Of the 10 selected mutations associated with ODDD, 2 were localized to the intracellular N-terminus or loop (S18P and I130T), 2 were localized to transmembrane helices (A40V and V216L), 4 were localized to extracellular loop 1 (N55D, Q58H, P59A and S69Y), and 2 were localized to extracellular loop 2(H194P and R202H)(FIG. 4A). All 10 mutations were autosomal dominant and represented a range of observed channel perturbations when expressed in cultured cells and/or in mouse models. For example, the I130T and R202H mutations have been documented to form channels with reduced conduction (Lai, A, et al. (2006) J Cell Sci. 119:532-541; Mclachlan E, et al. (2005) Cell Commun Adhes. 12:279-292), whereas S18P, A40V, P59A and V216L mutations have been observed to result in a total loss of channel function (Laird D W (2014) Febs Letters. 588:1339-1348).

[0256] Because the FETCH score reflects hemichannel docking (and thus all the ‘upstream’ processes underlying gap junction formation (i.e., Cx expression levels, trafficking, stabilization and turnover rate)), the disease associated Cx43 mutations were expected to exhibit diminished FETCH scores as compared to the WT-Cx43 isoform. After generating a positive control distribution for homotypic Cx43 by co-plating Cx43-FP constructs in conditions of increasing DNA transfection quantities and increasing co-plated densities (n=33), the mutant proteins in homotypic FETCH experiments were evaluated. Upon analysis, Cx43 mutant proteins demonstrated lower homotypic FETCH scores than WT-Cx43 (FIG. 4B).

[0257] Since connexin hemichannel docking is a prerequisite for gap junction-mediated exchange of small molecules and ions between cells, it was reasoned that mutations that decreased the FETCH scores would also diminish intercellular permeability. A standard method of evaluating gap junction dependent intercellular communication is fluorescence recovery after photo-bleaching (FRAP), which relies on the permeability of Cx43 gap junctions to a tracer dye (calcein-AM) as an indicator of functional channels (Wade M H, et al. (1986) Science. 232:525-528; Martinez A D, et al. (2002) Circ Res. 90:1100-1107; Abbaci M, et al. (2007) Biotechnol J. 2:50-61) (FIG. 4C). Whether functional channels were being formed by mutant proteins, despite FETCH scores indicating diminished docking, was evaluated using FRAP.

[0258] Unsurprisingly, all selected Cx43 ODDD-associated mutant proteins showed significantly impaired dye transfer in FRAP experiments (FIG. 4D). Thus, negative FETCH scores correlated with poor gap junction functionality as determined by FRAP. Because an additional interest rested in identifying a correlation between positive FETCH scores and FRAP-determined functionality of mutant proteins, random alanine scanning mutations of the Cx43 ELs were made at positions not explicitly characterized as disease associated. 5 constructs were generated—F70A, F179A, S182A, V184A and D190A (FIG. 4A). Upon FETCH evaluation, two mutations that retained their ability to homotypically dock—S182A and D190A—were identified. Follow-up FRAP analysis demonstrated that random Cx43 mutants with positive homotypic FETCH scores were able to mediate dye transfer in FRAP assays, comparable to Cx43-WT (FIG. 4D). Finally, it was shown that FETCH scores correlated with FRAP-determined functionality (FIG. 4E). Combined, these results showed that FETCH can be used to detect dysfunctional gap junction intercellular communication and can characterize connexin mutant proteins for gap junction docking competency—a potential component to functional perturbation in pathological phenotypes.

### Example 4

### FETCH Evaluated Engineered Connexins for New Docking Features

[0259] Though full interrogation of the existing, expansive Cx interaction space remains of major value, a provocative application of the FETCH method is towards the development of engineered connexins with novel features. Since FETCH evaluates docking interactions, specificity of which is determined in the Cx extracellular loops (ELs), EL chimeras that would confer new docking features to an individual Cx were developed. Cx43 and Cx26 are two connexin isoforms shown to have positive homotypic FETCH scores (indicative of docking) while having a very low heterotypic FETCH score (FIG. 3)—making these two constructs amenable for engineering and evaluation.

[0260] Accordingly, a chimeric construct consisting of the intracellular and transmembrane regions of Cx43 and the ELs of Cx26 was developed. (FIG. 5A). Such a connexin would be unique in that it would likely retain the trafficking, regulation, and conductivity features of Cx43, while acquiring the docking features of Cx26. Predictably, FETCH analysis demonstrated that the Cx43-ELs-Cx26 chimera preferentially docked with Cx26 and not Cx43 (FIG. 5B).

### Limitations of Experiments

[0261] For FETCH to be successful, cells must overexpress Cx-FP constructs to a sufficient degree to promote observable fluorescence exchange. Though HEK 293FT cells are rarely reported as vehicles for connexin studies, 293FT cells expressed significantly greater levels of exogenously introduced Cx-FP constructs than did 293 cells and HeLa cells. Moreover, though Cx43 gap junction plaques were identified in all the transfected cell lines, substantially larger surface area of plaques were observed in 293FTs, which can be due to the comparatively elevated protein expression (FIG. 7A-FIG. 7B). Critically, 293 and HeLa cell lines showed substantially lower FETCH scores, when expressing the otherwise robustly positive Cx43-FP constructs, thus, these cells lines are not recommended for FETCH analysis.

### Summary of Experiments

[0262] Disclosed here is FETCH, a novel method that employs flow cytometry to evaluate a natural product of gap junction turnover (connexosomes) as indicators of gap junction formation, a prerequisite for gap junction intercellular communication. While other methods primarily quantify gap junction conductive function in individual cell pairs or individual cells within a cell network, FETCH specifically captures hemichannel docking across a population of cells. By specifically evaluating hemichannel docking compatibility, FETCH can differentiate between two potential sources of gap junction non-functionality: (i) channels that are innately non-conductive and (ii) channels that fail to form, by precisely identifying the latter (FIG. 6). This distinction is critical for the dissection of complex mechanisms underlying both normal connexin physiology and connexin-associated pathologies.

[0263] To date, most studies have evaluated Cx43 (and other Cx isoform) mutations at the level of alterations in protein expression level, localization and conduction between cells. However, sufficient expression and plasma membrane localization do not guarantee docking. While the data provided herein did not identify Cx43 mutant proteins that successfully dock but are non-conductive, it stands to reason that mutations precisely characterized to have altered or disrupted gating properties would likely fit the scenario in which FETCH demonstrates docking and FRAP demonstrates non-conductivity.

[0264] While complementary to existing methods, FETCH makes advancements in terms of ease of use, accessibility, and time scale. Specifically, FETCH exploits the robust expression profile of the commercially available HEK 293FT cell line. Also, C-terminally tagged fluorescent vectors are widely-used and commercially available materials, and transient transfections avoid the costly and time-consuming generation and maintenance of stable cell lines. Also, FETCH is directly scalable for high-throughput evaluations as flow cytometry analysis can be completed from single sample tubes or multi-well plates.

[0265] The experiments provided herein show that FETCH can evaluate gap junction formation of numerous connexin proteins. Analysis of the entire complement of human connexin isoforms revealed that most isoforms generate positive FETCH scores when evaluated for homotypic docking. Furthermore, when evaluating heterotypic pairings of selected isoforms representing different isoform classes, positive FETCH scores were observed, which agrees with known heterotypic pairings such as Cx26/Cx32 and Cx43/Cx45, which generate heterotypic gap junctions in rodent liver and cardiomyocytes, respectively (Paul DL. (1986) J Cell Biol. 103(1):123-134; Veenstra R D, et al. (1986) Science. 233:972-974). Additionally, a potentially novel docking interaction when pairing Cx26/Cx36, was identified.

[0266] Finally, it was demonstrated that FETCH has utility in evaluating the docking ability of disease-relevant connexin mutant proteins. Specifically, several ODDD-associated Cx43 mutations were identified, and these Cx43 mutations result in docking perturbations that were also reflected in poor fluorescence recovery in GAP-FRAP functional analyses, indicating non-functionality.

[0267] Overall, these results demonstrate that FETCH is a valuable method that reliably evaluates connexin hemichannel docking interactions and can explore previously uncharacterized docking combinations of endogenous connexin isoforms, as well as evaluate docking features of mutant connexin proteins present in disease states.

[0268] Importantly, FETCH does not quantify hemichannel binding affinity. Instead, FETCH captures docking interactions in the context of several isoform specific variables (e.g., expression level, turnover rate, and plaque size) that likely contribute greatly to positive score variability amongst different isoforms. Thus, FETCH scores above a defined threshold are considered an indication of docking, but variation in the scores between different isoforms are not comparable. Furthermore, FETCH scores of individual isoforms can be increased by construct and condition optimization. On the other hand, discrepancies in FETCH score between wild-type and mutant counterparts of the same connexin isoform are comparable and directly identify perturbations in docking.

[0269] An important caveat is that FETCH conclusively identified docked, compatible connexin protein interactions, however, negative FETCH scores can reflect either non-compatible counterparts or a failure of one or both proteins to localize or fold properly.

[0270] Finally, FETCH does not reveal mechanism of pathology of evaluated disease-associated mutant proteins but instead sheds light on a single contributing aspect-docking ability of the mutant isoform. Thus, in an aspect, FETCH can be best utilized in conjunction with other biochemical and imaging analyses for comprehensive understanding of connexin behavior.

TABLE 5
Listing of Protein Sequences Provided in Sequence Listing.

| SEQ ID NO | Protein | UniProtKB No. |
|---|---|---|
| 1 | Gap Junction Protein Alpha 1 | P17302 |
| 2 | Gap Junction Protein Alpha 3 | Q9Y6H8 |
| 3 | Gap Junction Protein Alpha 4 | P35212 |
| 4 | Gap Junction Protein Alpha 5 | P36382 |
| 5 | Gap Junction Protein Alpha 8 | P48165 |
| 6 | Gap Junction Protein Alpha 9 | P57773 |
| 7 | Gap Junction Protein Alpha 10 | Q969M2 |
| 8 | Gap Junction Protein Beta 1 | P08034 |
| 9 | Gap Junction Protein Beta 2 | P29033 |
| 10 | Gap Junction Protein Beta 3 | O75712 |
| 11 | Gap Junction Protein Beta 4 | Q9NTQ9 |
| 12 | Gap Junction Protein Beta 5 | O95377 |
| 13 | Gap Junction Protein Beta 6 | O95452 |
| 14 | Gap Junction Protein Beta 7 | Q6PEYO |
| 15 | Gap Junction Protein Gamma 1 | P36383 |
| 16 | Gap Junction Protein Gamma 2 | Q5T442 |
| 17 | Gap Junction Protein Gamma 3 | Q8NFK1 |
| 18 | Gap Junction Protein Delta 2 | Q9UKL4 |
| 19 | Gap Junction Protein Delta 3 | Q8N144 |
| 20 | Gap Junction Protein Delta 4 | Q96KN9 |
| 21 | Gap Junction Protein Epsilon 1 | A6NN92 |

TABLE 6
Listing of Gene Sequences Provided in Sequence Listing.

| SEQ ID NO | Gene | NCBI Reference Sequence: Location |
|---|---|---|
| 22 | GJA1 | NG_008308.1: 5048-19129 |
| 23 | GJA3 | NG_016399.1: 4993-27790 |
| 24 | GJA4 | NC_000001.11: 34792999-34795747 |
| 25 | GJA5 | NG_009369.2: 5013-22176 |
| 26 | GJA8 | NG_016242.1: 4976-11451 |
| 27 | GJA9 | NC_000001.11: c38881587-38874069 |
| 28 | GJA10 | NC_000006.12: 89894469-89896120 |
| 29 | GJB1 | NG_008357.1: 5001-15305 |
| 30 | GJB2 | NG_008358.1: 5038-10506 |
| 31 | GJB3 | NG_008309.1: 5026-10176 |
| 32 | GJB4 | NG_016243.1: 5000-7587 |
| 33 | GJB5 | NC_000001.11: 34755047-34758512 |
| 34 | GJB6 | NG_008323.1: 5077-15434 |
| 35 | GJB7 | NC_000006.12: c87329278-87282980 |
| 36 | GJC1 | NC_000017.11: c44831364-44794104 |
| 37 | GJC2 | NG_011838.1: 5079-14975 |
| 38 | GJC3 | NG_016852.2: 5001-11355 |
| 39 | GJD2 | NC_000015.10: c34754998-34751032 |
| 40 | GJD3 | NC_000017.11: c40364737-40360652 |
| 41 | JD4 | NC_000010.11: 35605341-35608935 |
| 42 | GJE1 | NC_000006.12, 142132925-142135358 |

The application's sequence listing, which the Patent Office published only in electronic form, follows.

SEQUENCE LISTING (116 sequences)

SEQ ID NO: 1 - protein, 382 aa, Homo sapiens
MGDWSALGKLLDKVQAYSTAGGKVWLSVLFIFRILLLGTAVESAWGDEQSAFRCNTQQPGCENVCYDKSFPISHVRFWVLQIIFVSVPTLLYLAHVFYVMRKEEKLNKKEEELKVAQTDGVNVDMHLKQIEIKKFKYGIEEHGKVKMRGGLLRTYIISILFKSIFEVAFLLIQWYIYGFSLSAVYTCKRDPCPHQVDCFLSRPTEKTIFIIFMLVVSLVSLALNIIELFYVFFKGVKDRVKGKSDPYHATSGALSPAKDCGSQKYAYFNGCSSPTAPLSPMSPPGYKLVTGDRNNSSCRNYNKQASEQNWANYSAEQNRMGQAGSTISNSHAQPFDFPDDNQNSKKLAAGHELQPLAIVDQRPSSRASSRASSRPRPDDLEI

SEQ ID NO: 2 - protein, 435 aa, Homo sapiens
MGDWSFLGRLLENAQEHSTVIGKVWLTVLFIFRILVLGAAAEDVWGDEQSDFTCNTQQPGCENVCYDRAFPISHIRFWALQIIFVSTPTLIYLGHVLHIVRMEEKKKEREEEEQLKRESPSPKEPPQDNPSSRDDRGRVRMAGALLRTYVFNIIFKTLFEVGFIAGQYFLYGFELKPLYRCDRWPCPNTVDCFISRPTEKTIFIIFMLAVACASLLLNMLEIYHLGWKKLKQGVTSRLGPDASEAPLGTADPPPLPPSSRPPAVAIGFPPYYAHTAAPLGQARAVGYPGAPPPAADFKLLALTEARGKGQSAKLYNGHHHLLMTEQNWANQAAERQPPALKAYPAASTPAAPSPVGSSSPPLAHEAEAGAAPLLLDGSGSSLEGSALAGTPEEEEQAVTTAAQMHQPPLPLGDPGRASKASRASSGRARPEDLAI

SEQ ID NO: 3 - protein, 333 aa, Homo sapiens
MGDWGFLEKLLDQVQEHSTVVGKIWLTVLFIFRILILGLAGESVWGDEQSDFECNTAQPGCTNVCYDQAFPISHIRYWVLQFLFVSTPTLVYLGHVIYLSRREERLRQKEGELRALPAKDPQVERALAAVERQMAKISVAEDGRLRIRGALMGTYVASVLCKSVLEAGFLYGQWRLYGWTMEPVFVCQRAPCPYLVDCFVSRPTEKTIFIIFMLVVGLISLVLNLLELVHLLCRCLSRGMRARQGQDAPPTQGTSSDPYTDQVFFYLPVGQGPSSPPCPTYNGLSSSEQNWANLTTEERLASSRPPLFLDPPPQNGQKPPSRPSSSASKKQYV

SEQ ID NO: 4 - protein, 358 aa, Homo sapiens
MGDWSFLGNFLEEVHKHSTVVGKVWLTVLFIFRMLVLGTAAESSWGDEQADFRCDTIQPGCQNVCYDQAFPISHIRYWVLQIIFVSTPSLVYMGHAMHTVRMQEKRKLREAERAKEVRGSGSYEYPVAEKAELSCWEEGNGRIALQGTLLNTYVCSILIRTTMEVGFIVGQYFIYGIFLTTLHVCRRSPCPHPVNCYVSRPTEKNVFIVFMLAVAALSLLLSLAELYHLGWKKIRQRFVKPRQHMAKCQLSGPSVGIVQSCTPPPDFNQCLENGPGGKFFNPFSNNMASQQNTDNLVTEQVRGQEQTPGEGFIQVRYGQKPEVPNGVSPGHRLPHGYHSDKRRLSKASSKARSDDLSV

SEQ ID NO: 5 - protein, 433 aa, Homo sapiens
MGDWSFLGNILEEVNEHSTVIGRVWLTVLFIFRILILGTAAEFVWGDEQSDFVCNTQQPGCENVCYDEAFPISHIRLWVLQIIFVSTPSLMYVGHAVHYVRMEEKRKSREAEELGQQAGTNGGPDQGSVKKSSGSKGTKKFRLEGTLLRTYICHIIFKTLFEVGFIVGHYFLYGFRILPLYRCSRWPCPNVVDCFVSRPTEKTIFILFMLSVASVSLFLNVMELGHLGLKGIRSALKRPVEQPLGEIPEKSLHSIAVSSIQKAKGYQLLEEEKIVSHYFPLTEVGMVETSPLPAKPFNQFEEKISTGPLGDLSRGYQETLPSYAQVGAQEVEGEGPPAEEGAEPEVGEKKEEAERLTTEEQEKVAVPEGEKVETPGVDKEGEKEEPQSEKVSKQGLPAEKTPSLCPELTTDDARPLSRLSKASSRARSDDLTV

SEQ ID NO: 6 - protein, 515 aa, Homo sapiens
MGDWNLLGDTLEEVHIHSTMIGKIWLTILFIFRMLVLGVAAEDVWNDEQSGFICNTEQPGCRNVCYDQAFPISLIRYWVLQVIFVSSPSLVYMGHALYRLRVLEEERQRMKAQLRVELEEVEFEMPRDRRRLEQELCQLEKRKLNKAPLRGTLLCTYVIHIFTRSVVEVGFMIGQYLLYGFHLEPLFKCHGHPCPNIIDCFVSRPTEKTIFLLFMQSIATISLFLNILEIFHLGFKKIKRGLWGKYKLKKEHNEFHANKAKQNVAKYQSTSANSLKRLPSAPDYNLLVEKQTHTAVYPSLNSSSVFQPNPDNHSVNDEKCILDEQETVLSNEISTLSTSCSHFQHISSNNNKDTHKIFGKELNGNQLMEKRETEGKDSKRNYYSRGHRSIPGVAIDGENNMRQSPQTVFSLPANCDWKPRWLRATWGSSTEHENRGSPPKGNLKGQFRKGTVRTLPPSQGDSQSLDIPNTADSLGGLSFEPGLVRTCNNPVCPPNHVVSLTNNLIGRRVPTDLQI

SEQ ID NO: 7 - protein, 543 aa, Homo sapiens
MGDWNLLGGILEEVHSHSTIVGKIWLTILFIFRMLVLRVAAEDVWDDEQSAFACNTRQPGCNNICYDDAFPISLIRFWVLQIIFVSSPSLVYMGHALYRLRAFEKDRQRKKSHLRAQMENPDLDLEEQQRIDRELRRLEEQKRIHKVPLKGCLLRTYVLHILTRSVLEVGFMIGQYILYGFQMHPLYKCTQPPCPNAVDCFVSRPTEKTIFMLFMHSIAAISLLLNILEIFHLGIRKIMRTLYKKSSSEGIEDETGPPFHLKKYSVAQQCMICSSLPERISPLQANNQQQVIRVNVPKSKTMWQIPQPRQLEVDPSNGKKDWSEKDQHSGQLHVHSPCPWAGSAGNQHLGQQSDHSSFGLQNTMSQSWLGTTTAPRNCPSFAVGTWEQSQDPEPSGEPLTDLHSHCRDSEGSMRESGVWIDRSRPGSRKASFLSRLLSEKRHLHSDSGSSGSRNSSCLDFPHWENSPSPLPSVTGHRTSMVRQAALPIMELSQELFHSGCFLFPFFLPGVCMYVCVDREADGGGDYLWRDKIIHSIHSVKFNS

SEQ ID NO: 8 - protein, 283 aa, Homo sapiens
MNWTGLYTLLSGVNRHSTAIGRVWLSVIFIFRIMVLVVAAESVWGDEKSSFICNTLQPGCNSVCYDQFFPISHVRLWSLQLILVSTPALLVAMHVAHQQHIEKKMLRLEGHGDPLHLEEVKRHKVHISGTLWWTYVISVVFRLLFEAVFMYVFYLLYPGYAMVRLVKCDVYPCPNTVDCFVSRPTEKTVFTVFMLAASGICIILNVAEVVYLIIRACARRAQRRSNPPSRKGSGFGHRLSPEYKQNEINKLLSEQDGSLKDILRRSPGTGAGLAEKSDRCSAC

SEQ ID NO: 9 - protein, 226 aa, Homo sapiens
MDWGTLQTILGGVNKHSTSIGKIWLTVLFIFRIMILVVAAKEVWGDEQADFVCNTLQPGCKNVCYDHYFPISHIRLWALQLIFVSTPALLVAMHVAYRRHEKKRKFIKGEIKSEFKDIEEIKTQKVRIEGSLWWTYTSSIFFRVIFEAAFMYVFYVMYDGFSMQRLVKCNAWPCPNTVDCFVSRPTEKTVFTVFMIAVSGICILLNVTELCYLLIRYCSGKSKKPV

SEQ ID NO: 10 - protein, 270 aa, Homo sapiens
MDWKTLQALLSGVNKYSTAFGRIWLSVVFVFRVLVYVVAAERVWGDEQKDFDCNTKQPGCTNVCYDNYFPISNIRLWALQLIFVTCPSLLVILHVAYREERERRHRQKHGDQCAKLYDNAGKKHGGLWWTYLFSLIFKLIIEFLFLYLLHTLWHGFNMPRLVQCANVAPCPNIVDCYIARPTEKKIFTYFMVGASAVCIVLTICELCYLICHRVLRGLHKDKPRGGCSPSSSASRASTCRCHHKLVEAGEVDPDPGNNKLQASAPNLTPI

SEQ ID NO: 11 - protein, 266 aa, Homo sapiens
MNWAFLQGLLSGVNKYSTVLSRIWLSVVFIFRVLVYVVAAEEVWDDEQKDFVCNTKQPGCPNVCYDEFFPVSHVRLWALQLILVTCPSLLVVMHVAYREERERKHHLKHGPNAPSLYDNLSKKRGGLWWTYLLSLIFKAAVDAGFLYIFHRLYKDYDMPRVVACSVEPCPHTVDCYISRPTEKKVFTYFMVTTAAICILLNLSEVFYLVGKRCMEIFGPRHRRPRCRECLPDTCPPYVLSQGGHPEDGNSVLMKAGSAPVDAGGYP

SEQ ID NO: 12 - protein, 273 aa, Homo sapiens
MNWSIFEGLLSGVNKYSTAFGRIWLSLVFIFRVLVYLVTAERVWSDDHKDFDCNTRQPGCSNVCFDEFFPVSHVRLWALQLILVTCPSLLVVMHVAYREVQEKRHREAHGENSGRLYLNPGKKRGGLWWTYVCSLVFKASVDIAFLYVFHSFYPKYILPPVVKCHADPCPNIVDCFISKPSEKNIFTLFMVATAAICILLNLVELIYLVSKRCHECLAARKAQAMCTGHHPHGTTSSCKQDDLLSGDLIFLGSDSHPPLLPDRPRDHVKKTIL

SEQ ID NO: 13 - protein, 261 aa, Homo sapiens
MDWGTLHTFIGGVNKHSTSIGKVWITVIFIFRVMILVVAAQEVWGDEQEDFVCNTLQPGCKNVCYDHFFPVSHIRLWALQLIFVSTPALLVAMHVAYYRHETTRKFRRGEKRNDFKDIEDIKKQKVRIEGSLWWTYTSSIFFRIIFEAAFMYVFYFLYNGYHLPWVLKCGIDPCPNLVDCFISRPTEKTVFTIFMISASVICMLLNVAELCYLLLKVCFRRSKRAQTQKNHPNHALKESKQNEMNELISDSGQNAITGFPS

SEQ ID NO: 14 - protein, 223 aa, Homo sapiens
MSWMFLRDLLSGVNKYSTGTGWIWLAVVFVFRLLVYMVAAEHVWKDEQKEFECNSRQPGCKNVCFDDFFPISQVRLWALQLIMVSTPSLLVVLHVAYHEGREKRHRKKLYVSPGTMDGGLWYAYLISLIVKTGFEIGFLVLFYKLYDGFSVPYLIKCDLKPCPNTVDCFISKPTEKTIFILFLVITSCLCIVLNFIELSFLVLKCFIKCCLQKYLKKPQVLSV

SEQ ID NO: 15 - protein, 396 aa, Homo sapiens
MSWSFLTRLLEEIHNHSTFVGKIWLTVLIVFRIVLTAVGGESIYYDEQSKFVCNTEQPGCENVCYDAFAPLSHVRFWVFQIILVATPSVMYLGYAIHKIAKMEHGEADKKAARSKPYAMRWKQHRALEETEEDNEEDPMMYPEMELESDKENKEQSQPKPKHDGRRRIREDGLMKIYVLQLLARTVFEVGFLIGQYFLYGFQVHPFYVCSRLPCPHKIDCFISRPTEKTIFLLIMYGVTGLCLLLNIWEMLHLGFGTIRDSLNSKRRELEDPGAYNYPFTWNTPSAPPGYNIAVKPDQIQYTELSNAKIAYKQNKANTAQEQQYGSHEENLPADLEALQREIRMAQERLDLAVQAYSHQNNPHGPREKKAKVGSKAGSNKSTASSKSGDGKTSVWI

SEQ ID NO: 16 - protein, 439 aa, Homo sapiens
MTNMSWSFLTRLLEEIHNHSTFVGKVWLTVLVVFRIVLTAVGGEAIYSDEQAKFTCNTRQPGCDNVCYDAFAPLSHVRFWVFQIVVISTPSVMYLGYAVHRLARASEQERRRALRRRPGPRRAPRAHLPPPHAGWPEPADLGEEEPMLGLGEEEEEEETGAAEGAGEEAEEAGAEEACTKAVGADGKAAGTPGPTGQHDGRRRIQREGLMRVYVAQLVARAAFEVAFLVGQYLLYGFEVRPFFPCSRQPCPHVVDCFVSRPTEKTVFLLVMYVVSCLCLLLNLCEMAHLGLGSAQDAVRGRRGPPASAPAPAPRPPPCAFPAAAAGLACPPDYSLVVRAAERARAHDQNLANLALQALRDGAAAGDRDRDSSPCVGLPAASRGPPRAGAPASRTGSATSAGTVGEQGRPGTHERPGAKPRAGSEKGSASSRDGKTTVWI

SEQ ID NO: 17 - protein, 279 aa, Homo sapiens
MCGRFLRRLLAEESRRSTPVGRLLLPVLLGFRLVLLAASGPGVYGDEQSEFVCHTQQPGCKAACFDAFHPLSPLRFWVFQVILVAVPSALYMGFTLYHVIWHWELSGKGKEEETLIQGREGNTDVPGAGSLRLLWAYVAQLGARLVLEGAALGLQYHLYGFQMPSSFACRREPCLGSITCNLSRPSEKTIFLKTMFGVSGFCLLFTFLELVLLGLGRWWRTWKHKSSSSKYFLTSESTRRHKKATDSLPVVETKEQFQEAVPGRSLAQEKQRPVGPRDA

SEQ ID NO: 18 - protein, 321 aa, Homo sapiens
MGEWTILERLLEAAVQQHSTMIGRILLTVVVIFRILIVAIVGETVYDDEQTMFVCNTLQPGCNQACYDRAFPISHIRYWVFQIIMVCTPSLCFITYSVHQSAKQRERRYSTVFLALDRDPPESIGGPGGTGGGGSGGGKREDKKLQNAIVNGVLQNTENTSKETEPDCLEVKELTPHPSGLRTASKSKLRRQEGISRFYIIQVVFRNALEIGFLVGQYFLYGFSVPGLYECNRYPCIKEVECYVSRPTEKTVFLVFMFAVSGICVVLNLAELNHLGWRKIKLAVRGAQAKRKSIYEIRNKDLPRVSVPNFGRTQSSDSAYV

SEQ ID NO: 19 - protein, 294 aa, Homo sapiens
MGEWAFLGSLLDAVQLQSPLVGRLWLVVMLIFRILVLATVGGAVFEDEQEEFVCNTLQPGCRQTCYDRAFPVSHYRFWLFHILLLSAPPVLFVVYSMHRAGKEAGGAEAAAQCAPGLPEAQCAPCALRARRARRCYLLSVALRLLAELTFLGGQALLYGFRVAPHFACAGPPCPHTVDCFVSRPTEKTVFVLFYFAVGLLSALLSVAELGHLLWKGRPRAGERDNRCNRAHEEAQKLLPPPPPPPPPPALPSRRPGPEPCAPPAYAHPAPASLRECGSGRGKASPATGRRDLAI

SEQ ID NO: 20 - protein, 370 aa, Homo sapiens
MEGVDLLGFLIITLNCNVTMVGKLWFVLTMLLRMLVIVLAGRPVYQDEQERFVCNTLQPGCANVCYDVFSPVSHLRFWLIQGVCVLLPSAVFSVYVLHRGATLAALGPRRCPDPREPASGQRRCPRPFGERGGLQVPDFSAGYIIHLLLRTLLEAAFGALHYFLFGFLAPKKFPCTRPPCTGVVDCYVSRPTEKSLLMLFLWAVSALSFLLGLADLVCSLRRRMRRRPGPPTSPSIRKQSGASGHAEGRRTDEEGGREEEGAPAPPGARAGGEGAGSPRRTSRVSGHTKIPDEDESEVTSSASEKLGRQPRGRPHREAAQDPRGSGSEEQPSAAPSRLAAPPSCSSLQPPDPPASSSGAPHLRARKSEWV

SEQ ID NO: 21 - protein, 205 aa, Homo sapiens
MSLNYIKNFYEGCVKPPTVIGQFHTLFFGSIRIFFLGVLGFAVYGNEALHFICDPDKREVNLFCYNQFRPITPQVSFSALQLVIVLVPGALFHLYAACKSINQECILQKPIYTIIYILSVLLRISLAAIAFWLQIYLFGFQVKSLYLCDARSLGENMIIRCMVPEHFEKTIFLIAINTFTTITILLFVAEIFEIIFRRLYFPFRQ

SEQ ID NO: 22 - DNA, 14082 bp, Homo sapiens
aaaagcttttacgaggtatcagcacttttctttcattagggggaaggcgtgaggaaagtaccaaacagcagcggagttttaaactttaaatagacaggtctgagtgcctgaacttgccttttcattttacttcatcctccaaggagttcaatcacttggcgtgacttcactacttttaagcaaaagagtaagtttttaaaaaatgagaacacgttacctattagtttctttttctacaagtaaaacttttctaaagttttaaaatgtgttaaatgtaattttgaattatgatactgtaaatggattgatggatttgaaagtgtttctatagttttaaagttaaaatttattgtaccaaatatatattttgactgttaaaaaagtttctattaacattgcaacaggtgaaaaggttcaaacctttccgattagaataaaggattagtttactggatgtttggtttttcattttagagtatcattttattttgttttttttttgtaatcagtaatagtctaggtgctatcatttgttgggtggggggggggcggttaggcgcctgggttgggggatttgactgactacatcggaaaaatcaaagtgcaaatttgcttagcgtgcttcctatagtattctacacttcatagaataaagtgcttttttcatatggaaatcttgattgatgttctatagctttgcaaagccaacttcttttgtgacgaagtgctttgttaaaacatcgtggttacttgacttccacgtggttccttcctagaattttccccattaaacaaaaaggtataaaattcaagagtattaatattatgctttaaaaatcaacagtaaattgttactttgtgttagcaaccgctatggaaagatttgagaccctcaggagagacagcttttactcgaccacgttggcagtttaggagatgaaatctcttgaatgggtggtggctagttacagagcattagagatcagacgtttaaaaaagagtgtatgccagggtacttttccaaaaccgtctcctaaaacgggagctcctagaaagagcaggaaaaaaactttcttaaacagcgctttgggagctccccccgccaacacccgccgccccgcaccttccctctgctcgaacctgtaacagaattcagaactctggggcagttctttggagttggagctcctagggcaaagataacgctaatgcgttgtttaaaagggttcaatttttaaaatacttttattggtaacacccattctgttcatcagaaatgcagccatgcatttttgtgcccggtaaagattttctgttctgtgtaaatctacaaactaaaataattagtttagattcttgacgtgaccctgcagtggaagtatttgcaccagtgaatgctgaaaagcaaataaaaatgaaagctttgcggaggccgtgggccggacgggcgcggggcgcctcctgccatcttagcgtctgccgggatccttcccgcgccttcgctgcccgaaccagctcggtcttgggacgtttcccccaaatcctcacaagtcaaatcgaactcaggtccgagttcgtcactgcaaaggaacccggggtgcggggtgggagggataggaggagagatgggctgggtgccaaatggtagaacaaatggttgatttaattaaagttgtcaatctaatttcccatccctctcacaccagccctttttttttttctttttcttttttcctcttaaacttgctgaatcccactatctccgcgttggtaagaaaacctgaataccttgggaattgtgcttaaattgcacttgcaactcccctggaagttcctgaaacttcccgagaatgaggcggggcggctcaaggggaaagggcagggaggagagaccctcgggaagctgatgacgcgtccggggcaagtcagcctgtttccgagacgcgcgcctcacggtcgtagcagcgctgcgcccaccctgcccctttagtgacccagccagcctttgctgggggtttctgataacgctcatcgataagctctccttgctcccaaaaggcgtgcttctctttctctccaggtacaaagtaggggtgggaaggggagagctacacaatgttgtaaaaagaagcgtggctttatttggaagacggttgaatttcttttgcttcctcgacccagttagtaacgacaagaaagatactgaatatcgccctccgaaaatcgggcgcatttgaactcggtgaaaagtgtccctgtgaggaagcctaatgtttacttttgtgcaaggataactggaaattaaagcgtctagtaatgcagagatttcattaagcgagcgctcccctcccccccgcgccaggaatgaaataagccagttagacagaaaacacttttgggagaagactaattacttctgggtaggccgaattgactggaaattataccaagcaaaggcagtacattccattccgtcctggcgatgttgattctatattattagaacattgttcccccagtgtgggggtgctttgtacttcccaaagtcagggtagactggttacctgggaaaatgcagtgttagtgctttgctcctactttcttcactgtttaaacatgttccacatttttctaatgccttctgagggttctcaacccagccactgagttcctcacccttggcgactgtgataccaacaatgctgtcaccctccttgggaaacatggttgcaaagatgctccgcaggaggcagataaaaggctgtgctttcagatactgaaggttgctttgttacttagatgtttccaattcctgcatagagaaggagggaaaacacggggtgcattctttcttttcttttctctacatccaggggtgtagcttggtttgagcctttatatatgatacccgcagggaagggaatgataggacagtcaccagtgattaataccttccactccgcctttcctgttgttctgacttatcttcaggattctcagttatttgaagagatgtgtgggagcttatccgcacacaccagttcaactctggagagaaaaagtaattatctagtgtttattattaatgtaatattctgtatggataattcaagttttaaaaaatctccagagcatctcttccatgggagattaatgtatatattttttaaattcttagcataattgtctaaacctccatctaaagtcaccttttaactatgtatgtacagattgtcttttacctattttcaaactgtggttagctctttttttttaatacatcagtggcttatacaatttcataaatttcacattccaatttccctatgcttttaaaataatattttaagaaaaatatatgtttatcgtcagctgggcatgatggctcatgcctgtaatcctagccctttgagaggctgaggtgggaggatcgcttggggccaggagtttaaaaccagcctgagcaacatagcaagaccccacctctataaaaaaaaattttaaaaagaaaatgtatgtttgtcaatcatttcttagttgctgttttgctaaagaaaagatgaaaaatttaaaaccaaatgagctatatctaaaggtcgtctaaagagtaagaaccaaactttactgagctgttactaagagcatcacatgcatgagttatttattaaattctcattgaaaaaaatagactatcttaatcaatacacttgtgagggccctaagggtgtctttatatgattataaaataacaaggctattcactaaaaatagtcaatttggaggtggaagtaagagtaggggcagaggaaacgccaaggactgatagaaatatattaagttacatcacaattgaagaacatggcttttagcctcagcttctgacttgggattttctctctggtagccctaaattgatcttgagaaacttgttttgggggagaattgagtagtagctgttgaactagggagaggattgtcttttatgggatgcaccatcctctctttggatggagttcctcacacctcaattcccatctcatctcattaagtggatgctaatgtaagttcagtgatgaggaggggtaagagctggggaaggaaggcttgttggtgtttttatgttgtcctcccctctgcccccaaaataagcagttcacaacatcaaatacctacacaaatgtgcaattatttataaatatatttttacatacagtaagtttgatacactatagttaggccatctaggtataaataaggaagtaaaggttgggtattatctgatgaactgggaatcttttccatggtacttgaatctaatcactttagtgcctgcatagactcagactgtaaagatgttacattaaccagggttaatatcaactgctgctcttccccttcagagccctagccttccccgatatttatcattcttgaaataaacacgattttaaacaggctatttcttcttgtaatagtgtccttgtctacaataaaattgtgtggtgcaatcggagttagaacatcgtagaactaggggacaaccacacagttgtgttttttcctttttttttttgttttgtgttttaaatcttaacctgcaacaacctaacagtgaactgaatgtacaagcatgatacctgatgcagttctacaagaatcctaaccctcattaggatctcatttaacaaattcaggaagctctttgttaaaaagccttttttcttttttcttttaagcctgtcaaatttagcagtgggggttgcaaagagccttttttcttaatttagctcttttgcctgctcaggaatcatttgaagcatgttgtttcaacaaacagttctctgtttcagcaattgtcacttgaaaatttaacagtatgagaatgagatgatgacaatagttttttactgtgaagtttcctttttaattaatttgaaactttagaaatttgagatataactacaattaagagaatcccaaagagacagaaaaaaacaaactttttttttttttttgcacagtatctttctattttttgtggaagccccatttaattcatttaacatgtagctataccccaattaattaattcttttcttttcttttctttttttgagacggagtttcactctatcacccgggttggagtgcagtggtgtgatctctgctcactgcagcctccgcctcccgggttcaagcaattctcctgcctcagcctccagagtagctgggattacaggcacccgccaccacgcctggctacttttttgttgttgttgttgttgttgttgttgttgtttgtcgtttttttctttgagacggagtctcgctctgtcgcccaggctggagtgcagtggcgcgatcccggctcactgcaagctccgcctcccgggttcacgccattctcctgcctcagcctcccgagtagctgggactacaggtgcccgccaccacgcccggctaatttttttgtattttttttatttttagtagagacggggtttcactgtgttagccaggatggtctctatctcctaacctcgtgatccgcccgcctcggcctcccaaagtgctgggactacaggcttaagccaccgcacccggtctacttttttgtgtttttagtagagatgggatttcactatgttggccaggctgatctcaaactcttgacctcagatgatcctcccacctcggcctcccaaagtgctggaattacaggtgtgagccacatctcttactctttcaagcactggggatacagcagtgaacaaagcaaactccctcgtattgttcacattccagttaaggaagacaaataataaatccttctcatggaaggaggtacatagtaatcaggcaaatatttactatatcaagtagagagaaagtctattaaaataataattttttaaaaaccagggcaaagggaataggaaatgacaggactggggaaaggatgttgctatttcatatttggtggtcaggaaagttggctgatgaggtgagacctgcaacaagtgaggacgtgagctgcgtggatggagcagagctcatcaaaccaagctgattgttggtttgttttctcaagattgactgattactcggagtataggttggcaagtagggtgaccaggctaatgacatgaaacctagcaaactgatgatggctgagatcaagctaagggtggctgttttaagtgcggaggaatagacaactgagttcactcaatgacatttactggaggggcagaggttattataaaagtgaaagaaaacattacaagggtttgcatttgagtttttgggcatgaatatttttgggtgttagtacattagacacacacatgatttccctttcctcccaaaaaatccattaaatgattttatcgggaacttccatagacatttccttatgtaggtttagactctgattttattctttcagatattaaagtccttcaccttctcttttctttcaatcataaaaagatgctggatatcaaatttcactttagttttcaataatcctatttacctttatttaagtctccattctcaactcattacatttgtctcttcttgagaaaaatatttaaagtcgatagtaaaatacttaattctaataactattagtatattaatggcatggaaagacttgactgcaacttcggcacatgctctagcaaaaggcatagtcaaatgtaatttaaaatcaaagctttatttttaagagatctcatttgaattaaagcgtttaagttcttctgctctcagggagctgcagatggagatgtaaggagtgacaaggggctgtggagccaaggctgacctcaatgccgggtgcccagagagctgctgctcctggtactcagccccttggattttttagactgttccttctgctttcctgacatttctcccactcctaaatattttgaacaagaaagggccagaaatgtcaagaatagtaacaaacaccaaaaaaaccttacttcctaggccccacctccagaaattcagattcattcagactggtgaagaccaggaatgtatgtttttaacaaatgctgccaagtgactgtgatgcagttcaggaaaggggccagaggagcctcaggctggtcacacttagtgcctgtagctttgggcatccatccagtctagggggccatgaagagcaatggaaatgtaatctaacatggtgcatagacggcaaaaagcgtggtccagctgctaagactctgctcttaacaagaactttgcacaactcctcttagacagaccttggtctacatataaagcaccaactcagtatcctagaggtgaaggcatgaatatatgtgatatgtccagctgcgttggtcttctcatgtatcaaataagaaatatacctgtttccccctggtgaataaaagtgcagtttatagtctgtagatcaatgccagggattctgtaaacatataattatgcccttttattataagagggtattaacttaccatacaagacttggaaaaatgaagatattaaactagtttgggaaggtgcagcagggaggaacaaccagttgccaaaatttgattcatggcaaagtgagcaactaccaaaaaaaaagggaacaatttttgttacctgtttttgggcagctgtcacattaaacattatttgatggtatctatgatagtggagatcgacaggtagctacatgttacaggatactcggtgtccaattcgataattcgtatcttattaagatgaaagagtataactcattaatgcaaatgacaactgcatgggtgcttaaagaaaagacaactttgcaattaagttactagagtattaaaaaagaactaatgaagagctgtctgatgacttagttcacatactatggaactgtggagtgtttttgtagaatctcaaaattatatgaaagtcatgtatcatgaatttttttatagaatgtaaataaagactatactttcagggatcatttctatagtttgttactagaatgtaaataaacttagtgatgaattactataagcatctacacaatcatattttactttgagtaatgatgaaatcctagctaaaataacttctgttctgcctggtcatatttctagatatgataggtttgtcttcagctctatcgttgcatgaatgtgatgagatgtatgcaaagtttatctttttatacttgattgtttttgttatttttcccctagcaattgaaatatgtgagcaaaagcagatgacactggcaaaatactgtaattttttacaaacagaattagggccaattttacacatcatcacatagaaactgtctattgatatagctccaaagattctgtttgtctgaccctcatggactatacttcttcatttccagtctagtattttctgctaaattgtagggtttttttttctttcacattctctcaccatcaaactgtccatcacggctaaattactccctcacttcaagcctttccttggctattcaactgtctttgtcagcctttcaagcctttgttcttatttgactgctgttttaaattgatgctgttttcatacatcaatttcacttcctaacttgtcacttcagaatctaaaatgacccttcctaagtaaaagggaagctccctttcttatgaccactgggggagtgttatttctgtggccttcacacccacctcccactcttactcagcattctttggcactagtccctgggctgtcatcaaatgtacccatgataccgtggtaccatctagctggtgcatagtttagctttatggctcagccatctcttctttgttcggtccaggaaatcccaggtcaggtgcccatttcattttttcttgttctctatggccagaagatgcagtcattagacagaaatgtaatgttgcttactgaggaagaagactcccctggatttcatttacttcctacaaggagatacagctcaatagttcaacaccagaagagaaactcctttatattcagatagtgaacatatttctaagaagcctaaataatcctacctttagatactctatttagaattcattactaagctcctgcaaagtcttagctttgcttgtttttaattattaaacaatctttgactaatttgtccttttctaaatcctccaattactactatgtgctgaaaattagcctatattccctatgcctgccacatcatgttactcacttcttcccagctttcagccctggctaaggttgtgtatatcaaagcctggaaacatttctagctttagcgcagccttactgtacttttaaaaccagtgtgaggcattgaaaagacttgcccggggattgtgaatcttcttctggctctgtctatagctaaatatttcctataccctgagaacctctgagaacctcaatttttatcagctaaatggataatcggcaattagaagcataaattgaactagacaactttggggattcttgttggtttctactgacttacatctttttagtgagacggagtctctctttgtcacccaggctggagtgcagtggcgtgatctctgcaagctccgcctcccgggttcaagcgattctcttgccttagcctcccgagtagctgggactacaggctcccaccaccacacctggctaatttcttgtattttttgtagagacggggtttcaccatgttagccaggatggtctgaatctcctgacctcatgatccacccgcctcccaaagtgcttataggcgtgagtgcattataggcgtgagccaccacgcctggccagatctttttcttatcctcagtaatggagaaggcgtggactttagatagctagatattgataagaagttaaatgggatgtatagcctgagggtccaaagcccagtaagggaactttaaagtatataacaatgaaagatgaaaaccaatcttttctggctggagaaaacaccctgaagtaggttttgtttgtttgttttttaataaggctgtgagtagtattgagacaaaatgaactttttacatgaagtgtgatgtgtatttagtctttgtttttcaaagtaggttactacatataatgacacattgtagcaaaagagtatatttccatacagcctactttttctctggacagaaggctgacttctgagctacataagtcactgcttaagaaaaaaatagtcaccattgcttgggaggctaaggcaggaggatttcttgagcccaggggcctgggcaacatagtgaaatcctatctctaaaaaaagaaacagaaaagtgtaaatgacaataatatagggtatgcacaaattacacttgatataccattgaaaaatcttccagaggccaggcgtggtggctcacacctgtaatcccagcactttgggaggctgaggtagatggatcacctgaggtcaggagttcgagaccagcctgagcaacatggagaaacctcatctctactaaaaatacaaaattagccaggcgtgatggcacatgcctgtaatcccagctacttaggaggctgaggcaggagaatcgctggaacctaagaggcggaagttgtggtgagctgagattgtgccattgcactccagcctgggcaacaagagggaaacaccatcttaaaaaaaaaatctttcagagtgaaattagtaataaaatgatatataatagcattaaggttttggaaagaaggttatggatgtgtgtttataggtattcttacctggattcttgatacctatgctttgaataacacacatcaggattttgcttagcaaacacagatctaccaggcaaaaactgtcctcatttatcagacaaataaaaggagcagaggcttagcacaggtggcttctcaagtcacacagcaaggcagtggttgagcaagcaatacaccttcccaggttaaagactgcaactcatcatctgttgcttctaagacttactttgtctcaacaaacaaaacaaaacacttgttagatcttttcttcgttggcaaaaatgggacaggaagagtttgcacttggttttttgtgaaagaatgttagaaatacgtgaaaccgttggtagtattttgactatcacctgaaaggtactaaatgttaaactagtaatttgcaatctgtgatccttgaattgtctctttgtttctttcaggtggtgcccaggcaacatgggtgactggagcgccttaggcaaactccttgacaaggttcaagcctactcaactgctggagggaaggtgtggctgtcagtacttttcattttccgaatcctgctgctggggacagcggttgagtcagcctggggagatgagcagtctgcctttcgttgtaacactcagcaacctggttgtgaaaatgtctgctatgacaagtctttcccaatctctcatgtgcgcttctgggtcctgcagatcatatttgtgtctgtacccacactcttgtacctggctcatgtgttctatgtgatgcgaaaggaagagaaactgaacaagaaagaggaagaactcaaggttgcccaaactgatggtgtcaatgtggacatgcacttgaagcagattgagataaagaagttcaagtacggtattgaagagcatggtaaggtgaaaatgcgaggggggttgctgcgaacctacatcatcagtatcctcttcaagtctatctttgaggtggccttcttgctgatccagtggtacatctatggattcagcttgagtgctgtttacacttgcaaaagagatccctgcccacatcaggtggactgtttcctctctcgccccacggagaaaaccatcttcatcatcttcatgctggtggtgtccttggtgtccctggccttgaatatcattgaactcttctatgttttcttcaagggcgttaaggatcgggttaagggaaagagcgacccttaccatgcgaccagtggtgcgctgagccctgccaaagactgtgggtctcaaaaatatgcttatttcaatggctgctcctcaccaaccgctcccctctcgcctatgtctcctcctgggtacaagctggttactggcgacagaaacaattcttcttgccgcaattacaacaagcaagcaagtgagcaaaactgggctaattacagtgcagaacaaaatcgaatggggcaggcgggaagcaccatctctaactcccatgcacagccttttgatttccccgatgataaccagaattctaaaaaactagctgctggacatgaattacagccactagccattgtggaccagcgaccttcaagcagagccagcagtcgtgccagcagcagacctcggcctgatgacctggagatctagatacaggcttgaaagcatcaagattccactcaattgtggagaagaaaaaaggtgctgtagaaagtgcaccaggtgttaattttgatccggtggaggtggtactcaacagccttattcatgaggcttagaaaacacaaagacattagaatacctaggttcactgggggtgtatggggtagatgggtggagagggaggggataagagaggtgcatgttggtatttaaagtagtggattcaaagaacttagattataaataagagttccattaggtgatacatagataagggctttttctccccgcaaacacccctaagaatggttctgtgtatgtgaatgagcgggtggtaattgtggctaaatatttttgttttaccaagaaactgaaataattctggccaggaataaatacttcctgaacatcttaggtcttttcaacaagaaaaagacagaggattgtccttaagtccctgctaaaacattccattgttaaaatttgcactttgaaggtaagctttctaggcctgaccctccaggtgtcaatggacttgtgctactatatttttttattcttggtatcagtttaaaattcagacaaggcccacagaataagattttccatgcatttgcaaatacgtatattctttttccatccacttgcacaatatcattaccatcactttttcatcattcctcagctactactcacattcatttaatggtttctgtaaacatttttaagacagttgggatgtcacttaacattttttttttgagctaaagtcagggaatcaagccatgcttaatatttaacaatcacttatatgtgtgtcgaagagtttgttttgtttgtcatgtattggtacaagcagatacagtataaactcacaaacacagatttgaaaataatgcacatatggtgttcaaatttgaacctttctcatggatttttgtggtgtgggccaatatggtgtttacattatataattcctgctgtggcaagtaaagcacactttttttttctcctaaaatgtttttccctgtgtatcctattatggatactggttttgttaattatgattctttattttctctcctttttttaggatatagcagtaatgctattactgaaatgaatttcctttttctgaaatgtaatcattgatgcttgaatgatagaattttagtactgtaaacaggctttagtcattaatgtgagagacttagaaaaaatgcttagagtggactattaaatgtgcctaaatgaattttgcagtaactggtattcttgggttttcctacttaatacacagtaattcagaacttgtattctattatgagtttagcagtcttttggagtgaccagcaactttgatgtttgcactaagattttatttggaatgcaagagaggttgaaagaggattcagtagtacacatacaactaatttatttgaactatatgttgaagacatctaccagtttctccaaatgccttttttaaaactcatcacagaagattggtgaaaatgctgagtatgacacttttcttcttgcatgcatgtcagctacataaacagttttgtacaatgaaaattactaatttgtttgacattccatgttaaactacggtcatgttcagcttcattgcatgtaatgtagacctagtccatcagatcatgtgttctggagagtgttctttattcaataaagttttaatttagtataaacata

SEQ ID NO: 23 - DNA, 22798 bp, Homo sapiens
gcacactggggctgcagggatggcgatcagggcggggaggtcgggccctggcgcggggcgcacgcgtgaagcagcaccgcacgtgtgaaaggaattcttttcagagcggccgggagccctgctccggaggaacgcacccgggtcgccgccgcggcagagcggggtaaggcgggccgggcgccccggaggccaggcacaggggccgagggcagcgcggggcggggacgggcgggtcggcggcgcagcggagctgccgggcgagcccagcgggctgagactgccgagctgggaagccgagccccggcacgtgtgcggctcccagccccctaggattctttcaggattcttcaaaaagttgtggggagctcgggaaatttgtgagaaacttttggaataattgatcttcctcctttgctcctggaggtctggagagcagcgcctcgtttggcttcccttgatggacagtccaaggccgagtttaagttgttttcctggggttgttttccccctcgggtggaggaagccgggctgtcccggaccgtcaggctgtagggctcctagcgatgctgaaatgcttgaaaactctaagcagatgtcaccgcgccagctaacggcgcgcacccagccgtccacgggcattcagcatcgccgtgctcctaaaagtcctgttgggattgtttagaaacaaggttggctcgcctacatttttttcagaaactttttaaaactttttatttttaagaaacactgtagctattaatgccacgaccagatttctcgacctgtatgtttgttatgatgtgttcaactataaggaatttgcagaggagtggaaaagcactgtccgagccccttcccgtaggagacttgagaaaacaaacggcagtgacgcggctgcatttgctttgttgccgactccacactagtgagcaaaattcatcctaccatgtagagttctcggttcgtgaatatgtgactgcaactttagaactccagtttttattttatcaagatgtctccaaaacatgccatttaaaaatgattctatacaaacagctgacaagcgaattatgggtctcatcacccaggaattaaaaaccatggtgatttatgatgtgcgcatcacttcactggcggtccatccatgtgcaagacaaacattaaaagattaaagaggaaaaaagagggatttattttccgaatatcagtgtgttcaaagtaaacatcagctagtttggcacagattccacctgctcagcagtttggttcatatcgagataagcatctcataagggcaatgcatgtgttgctgtagtggaaagtaattcacgaaacggtactactctaacaaatcagacagtactgtttcttaaccaggaaccgttaactggctgaaagctgtcttaaaagaatggcgggtaacaaaattttttgccaataaggaaaatatttttgacccagttttcttgaatgttactcacattttaacttattatattcatttctcttagctaaaataacgtgtacacactacatttgaaacgaaaaattacgtttatcgcagccttttttttttttttttttttttttttttttgagatggagtctcgctctgtcacccaggctggagtgcagtggtgcgatctcggctcactgcaacctcccgagtagctgggactacaggcgtctaccaccatgccttcttcctccctccgctggatggtagctattcccagtactatgtagtacttacattttgatctgttttttgccactctgcctctctcatagattgcaaatgaatctcctgagagtgaggactggatcttaattgttttgctgtcctcagtgtgtggcacagtgccacacacaataggtaataatgttttataataataataaatgtttactgaattgaggagggaaaaaatccaatatatgtgacaacagcatatatgtctctaaaaaacagtatgtttctgcaatttctgtataatgcttaaaggcaataaaaataataaagtttcatcttaattttcattcctacagtggtggaaaattcctcatgataactaggttagtactctactgcttgctttttttctttttctttttcttttttttttttttttttttttttgagagttttgctcttgtccaggctggagtgcaatggcacagtggcacagtcttggctcattgcgacttctgcctcccagttaaagcgattctcctgcctcagcctcccttgtagctgggattacaggcatgcgccaccacgcctggctaatttttgtatttttagtagagacacagtttcaccatgttggacaggctggtctcaaactcctgacctcaggtgatccacccacctcagcctcccaaagtgctggaattacaggcgtgagccaccgcgcccagcctactgcttgcttttttaaaactcctgtacatctccaaaagtaatggttgatgtgaatagtttccacactcttatgtgtcttatttaatttgaagaattggtttgctttaaatttactgttaacaaactaatgatactagatataaaaattaattagctttttacatttagacctcctgattatctccatggattattgcttatttattcctgaaactccatttcctgttgattttaaaataaatcttttattctagaacatagaagcaatttctggttacacagcaatagaagtagatttgagtaagaaaagtgaaatcatactaatactatagaaattatttctgcaaaaaaatagaaaatattttgacagatgtaatttttatcagtaatatcagtggaataataaaataccataattatcaggttgtgggattttgttcactaagcaagagtaaaaatatctgaatttactttaaaaagataattctgactgggtgtggtggctcatgcatgtaatcccagcactttttgggaggctgaggcaggaggatctcttgagcccaggagtttgagaccagcccaggcaatatagtgagatacagtcacttcaaaatattttttataaaattagcccagtgtggtggtacaaacctatagtcccagctactcaggaggctgaggcaggaggatcatttgagcccaagagattgaggctgcagtaagccataagtgtgacagaaaaaaaaaaaaagataattcaaatttgtgatgaagtaattgggctgtccttagcatatcagtaatatttaaccatttttataaaagataaaaataccccccttgagacagtctggactggaaaaaaaaagtgaaagcttaacatgtactccagcccacatttctaaacatatgtattccagtatgttagaatataataaaatgcaaaaggcatgtaatacatagtgtcataagctgaacagtctgcctgctgcatcgcccatgaagtggtgtgggaggggaagggaagttgggccaggagttggaggttgggcacttctgtgctggtgtcagcactgtgggctgtgcaactttaggcaagtctcaggaccctctctgagctgccatttcccagtttgtaaaataaggagcataaactagaccacttctaaggttcatcccttgccaaaatgctaagattccatatttcttctgtcgataatgagtaaggttcctgaaggatgtcatttggatttatatgaggaaattgccttttaactgactgcactgtgtttatgaggtcagtgtttggtcatctgttcagacatcatgacttgtgttttagacatgacaaaagcctgttctgatcgctgctatgctgaagcacccctgtaattttctctattacttacccttgccccaagccacccctcagaaagtggggtactgctaagttcaattttaccttaaggaagtcactttttttcattattcaatttttaaaactttgaggactaaaacattgaaggaaatacattaacacatcactaaaatgtctgaataaatgtttggataagtaaataatttcagtggaattcttaagtggttcacagaagttattaaaacttacaatgccctttaataattggcagaagaaaccagagggctccactgggagatggagctgggaggtctctggagggttgaaaggaaccccagtggggcgtcttggcaggcagttgtttctaattacgctgcaactctttacattttcctgtcaattgaattgaaactaaaccagctgttaattttctagcttaatgttagaactccctgtggaaatggtgctttagtgctgatttctagagggaatatttattcaagtatttcaagaagaaagactgtagataaatagtatattttaaattttgccattctcgagtataaaatattgaagacaattttttaaattaacacagctgttttaattacttccagtttaaaattagctctcactatggccaggcttggtggctcatgcctatgatcccaacactttgggaggccagggtgcacagatcacctgaggtcaggagttcaagaccagcctggccaacatggtgaaaccagaaatatttttgtattttctaccaaaaattgggtaggtgtggtgacacacgcctgtaatcccagctacttgggaggatgaggcccgagaattgcttgaacctgggaggcagaggttgcagtgagccaagatcatgccactccactccagcctgggagtgcagtgagattctgtcataaaataaaataaaataaaataaaatgccctcactaagattttaagttataaaaggtaaaaaaagattagttcctccctttgactagagatgaaaactgttcaccatatttactttagccaaataaagatttaagagcatatgacttttcaggtatgcataaaagattgaaatccccacatgaaaaagaaaataaaagaaataataataatacatagatggcagacactgtcgtacatgctttccatacattcttatttcataagtacatttaaaatataaaaatgtataatcctagcaatgacttagaactattaaagaagttgaaaattaaatttataatattcctaaatcagttggctctggatgagagtaatgtttcctgcaacagcattagattattgaaacatcaagaatagaacccacatatctctgcatgtaaattagaaatggaaacccctggaactatacaataaccacataactttgagatcaaggatactcttaaactgtatatgtgtattttatagtaatgccaacaaatactaaaatcttcattatctattgaaaagatctataggactcctatagatttattctatatattatgaatatggcatacaaaataggacaagggagaaaataaaataacctgtcatttttaaaagcatgtcaaagttggttcattaacaaaagataaactagcaagactaatattttaaatccccaaataaacaatatttggaaccaaaggaatttgactacaaacaccatagcgtttcaaaatcataagaaaatgccatgaataattttatgccaacaaatttgaaacataaagtggaaaattttctaaaaaatgtaagtgaccaaatttgacttagtaaacagtaaacctacgtatgttagtaacagttaatgaaattaaatttgtaattaagtcttccctcctacccccctaaaaaaaaagacattagtcccaaactcttctataggagattcttatatgagcttattcagataattttaaaattttcatgttaaaataactttcataccaaaatctgatgataggacagaaaagctgaaaccagtcttaaatatgaacatataagaatcgaaaataaagtagtagcaaattgaatgtgctaggatattaaaaataaaatcattgataggcgtggtggctcacacttgtaatcccagcactttgggagtctgaggcaggaggatggcttgaggccaggagtttgagaccaaccctggcaatatagtgagaccccatcttcacaaaataaaaatgaaaataaaaattaatcggctgtggtggtgtgtgcctgtagtctcagctagttgggaagctgaggcaggaggattgcttgagcccagtagttcaaagttacagtgagctgtaatcatgccactgtattccatcctgagtgacagagcaaggccttgtctcaaaaaaataaggtaattaaatcataacaaagaggacttaccctctttagtgattaacatctaaaaaatcacaatagatggaggaaaaaagtgttgcattaaaaccagtagtcattcatagtttaaaaaattgaaaacagaacaaactttttagcaaagaaagactggaaggaaatgtctttagtctgataaaaattaaaacatcgtgctcaatgataaaactttaaaagcattcatattaaagtcagaaacaagaaaatatgttaccacaccgtattatgctagaagtcctggccagcaaagggaaaacaagaaaaagaaataacaggtattagacttaggaaaggaagagacaaatttatccttaagagtagattatttctatgtctacacagaaaatccaaaagaatctattagaactagaaaagcctttgtaacaggttgctggatacaatatcaacatacaaaaggaatgttcctaagtactaataacaatcaagcagaaaattttaaaaactcttcagaacaactgtaaagaagtatggagggataaatctaatagatgtgtgagaacttcagggacagcatcctaaggctcagggcattaaagaagtgtcgcagcagtgaagccattgcacttgctagtgggaaatgagtgtacagaagtaaatctgattcatctctaaacttactgcatttccaatccaaaccctatcttggatttttgtgggtcttggaaaactatacctaagtttcctgtgttagaagtaaaaagccaaaaattgtcgaaagacacatttggagaacaaggttgggggacttgtcctaccagataccaagtgctgtatatctagaactgttgccattgggtgtcctgctggtgtgggtaacaggggtagccttctgtcattttcttccggagacgaaaactaatatgttctgtcagtgtgaaacttcagagattcaggattttcctctttcatgctggtctgtgtaattgaactgtggcactaaattataagtgactctaaaccagcttttaaaggcctgcttttcttttttttttttaatttaattttttattattattatactttaagttctagggtacatgtgcacaatgtgcaggtttgttacatatgtatacatgtgccacgttggtgtgctgcacctgttaacttgtcatttacattaggtatatctcctaatactatcccttccccctccccgcaccccacaacaggccccagtgtgtgatgttccccaccctgtgtccaagtgttctcatttttcacttctcacctatgagtgagaacatgtggtgtttggttttctgtccttgcgatggtttgctcagaatgatggtttctagcttcatccatgtccctacaaaggacatgaactcatccttttttatggctgcatagtattccatggtgtatatgtgccacattttcttaatccagtctatcattgatggacatttgggttggttccaagtctttgctattgtgaatagtgctgcagtaaacatacatgtgcttgtgtctttatggcagcatgatttataatctaaagacctgcttttcctcttgcttgaacagtgctaaatgttgaagtcagccatatagagtacaagaaaaggtcttttgttccttttgttattttgacaggtttgttttgaattctgtattttttaaaaagtcagatgagaactatgaaaagggtgggacgatgtaccaaacaccataggctaggtcttgtggtatctggaaattacagtctttaggtgcaaaagcttgaaataggcaaggaatgaaagaggctaatggaagacagtcttgccggtggctgaaaagatgactaactagataagcccattttcatcatataatatttgtgacttaatatttgtgacagctcaccatgccctcgtagaaatgtgcttaaaccaggaatgcaaaaatgagcatctgaaccaccattgccctgtaccaaaccctcacagacattaatagttaaacatagaactctttctgggtaagcctacttgtgaccctcaaaatcctactcatgagtgttccaggcaatcacaaacacttaatacaaaattaatttacctagctttactccatattatattacctctaatttgtaaaccaagtaacagtgttgtaaattgtcagtatagactaggcgtggtagctctcatctgtacagcactttgggagaccaaggcaggcaaatcacctgaggtcaggagttccagaccagcctggtcaacagccaaaaccctgtctctactaaaaatacaaaaattagccaggtgtggtggtgggtgcctgtaatcccagctactcatgaggctgaggcacaagaatcgcctgaacccacaagacagaggttgcagtgagccgagattgtaccactgcactccagcctgggcaacagagggagaccctgtctcaaaaaaaaaatttctttttaattgtcaatatgatattatgagagggaatcaagtgtggtacaaattataccttttggctgtgactcgttccagagacttaactaaaacttgcacttggtggtgatcagctcctctgcaggtgcccggcccatctgtgctcaccctctggatgctgttagacccctgggctttactgtcgcccccgtttcctcctcccctgcccttcaatgatctaaatccagggccacttggtgacaactcccagatgtgcacctccagcttccacactcacacgtctcaggcattttaaacttagcatgtcccagacaattcatgatcgccattttcttccccaaacctggacctcctctggtctccccatcttggtaaaaggcagttccattactcccgttctgagcaccagtgctggtgccctcccgacaccagcccaggggcatgccgggccttttctcacacctcgactgctcacatcatttctctggattgtggtccagcctccttcctggaggctgtgcgtttgcccctgcccccatagactgtcctagggtggccctgtgagcgtggctactcttctgttccatccctccagtactttcccagcacactgaagtgagagcccgggttctcttcccatctgctgtggcctgtctgcctcccccgcctcagcttgctgagctcaagtaatccatcctcgccgtcccttgagcccacgagggatgcccctaactgagagccccttctggcctggatcactctgccctcatacctgaggctcccatgtcctggagccccggtctgctctggcctgtgcacccccactgatgctcctccgcggctttccacttctccggggtatcgggagtctgacacatggaacttctctcgtgttgtgtgacttcccgccagcatgggggctgcactgggacaggagaccctgtgttttgttctacgccgtcctggggctggaggcacccctttggggagcacgcctcagcaacccttgttgactgcctgcatctcctgtacgtgcagaggaatgggttgtggggttggggggcaggagctgatctcttccacatcctctccagtccttgctatcaagcttccttatctcctggagggctgagtcctgctcttgcctgaggaggtgacctcctctttgaccccactgacaagagtcttgtcagcactctggagaccttctgcccacgcctgccctcactgactgcctcctggccggaaggagccaccttgctcccgccccaccctccctccaacaccctccttcctctctgatgtccaccacccacaccaccccatctggggtacctctgctgggccccgggccccacttttgcccatgctctctcctttcctgacgttcttgatgtactgagaacagatggaagccgatggcactacccatctgcactgcattgacccctcccccaggacaggacacttgaggaccacagtggtctcctgccttcctgtgaggtggacaggcctttccctactccatcctttgggccctctaaagggcactgacgcagagtcacccctgcctcagaggccccagctgagcaccacgggccctggctctccagcctcacccatcggaggcaagtggctgtcacagctgtgccaggctctgcggggcctcagggggccttcgccctccagccccgcctgggatcgcatcgagggtcccacattgtcttgagaggtgggaggtcactgcctgtattcccgaggtcagaattttctaaatgaactttctcagaagactaagggaaaacagaacagagttaaaaggataaaacaacttcaaagcacaccttccaaaaacctaacacaatctaagcctgtggccttctctggggatgctcgtcaggcacagaccgagggtgccttcccccacgctgtgcaggacgcggtcctcccggcccagtcttagtccccacactgccagaccaccttcacacacacacacacacacacacacacaccaggagcagtggtctcctgcctccctcttcatctctgttctttgctccgtggtcctgcctgaaaggggaagctgcagtgcagaccctcctcctgacccctccagccccatgccgccagctgcctcctgattgtcttcgttcctgtctccaccactgctttcacagccaccccctcacctttcttccagctcaggtcagcacttgccccaacttcttcctctttaaacggtgccatcattttcccggtcaccagggttagcctctggttcatagcttttttattccctgactctagtcagacgctgcgttctgctttatttttgtcttcagaatgtgtctccttgctgtcccttcttttttccattcgtctgcctgtcacccagcccaggccttggacactcactccgagattaccacgctgttcctgaggccctgcctcattcgtgaagagcacttccagcctgttgctccctctcagcattgttgaggggctcccactctttcattcatctgtcctgcaagtgtttattgaacgtctgctatgtgcagagtatggccacagcctggctctgctgtgcagaagccaccttttaaaatcactgcttccaacccacaacccctgttcccaccttcatggaaacattgctctcttctggaaatgcattcccttctcccacctcttatccaaaactgcaactcctaatcccagctgaaatcccacttttccccaactgcccattttagtatgatacgaatatcccttttctctgaaatccccttgcatgtatatattatgtagctccctaatttgctgaatttttccacctccacaaatagatttttaagatagagactattccttaaactatttctttctcttttttttaagagacagggtcctgctctgtcacccagactggaacgcagtggcacaatcatggctcactacagcctcaacttccctggctcaattgatcctcccaccacagccccccacgtagctggtactataggcatgcaccaccacacttagctaattttttgtacagaggaagtctcgctatgttgcccaggctgcccctgaactcctgggctcaagagatcctcctgcttggcctcccaaagtgcagagattacaggtgtgagctactgcaccgagatcattccttaaacttcttgtgtggccatcaaaacctgtggcccagaattgagagcaagactgtcactgaggaaatagccattgatttgtctgagggaaaatgcaatggatcttgaaggccaagggggaaacaatttaccgttgaaaggaaaacgtaacttttcaaagactatgaaagcagcgtcataaattttgaaacataagacctgtttgttattcagacgactaagaatcaaggttttcactgaggcagaaccaaaaagattaagggccatctcatgggagatcataaacaccctgccacacagtgctgtgtaacccccacagtttttaggtcagttctctaaaaaggtttcaacaacatgggctgtggtattctgtcattaggtcgcgtgcaccttgcaaggttaagcgatcacaccgggggcctccccgtgggtgatgagcgaaagcccgtcttttcctctgcccagcggtactcaggacacatggttcagcagcgccttgcctgacctcagcctctgtcagtcctggcataccttctctcatcctctgcctgtacttagcacagaagagtctttctgcgacacatgtgcaactctctgctgatttcactatctagtgatattaggaatatgattacaaagtgatatcaggctgggcgcggtggctcacacctgtaatcccagcactgtaggaggccaaggtaggtggatcacttgaggccaggagttccagaccagcctgggcaacatcacaagacctcgtctctacaaaaacatgaaaattagccctgcatgatggtgcatacctgtagtcccagctacttggtaggctgaggtgggagaatcaccggagctctgggaatttgaggctgcagtgagctatgatccgtgccactgcaccttagcctgagcgacagaatgagactctgtctcaaaaaaaaaaaaaaaaaaaaaagaaccatagtattggtaaaatgcccccagagcctctgcatgtcatccagagccaactaaagtctgacggcgaagggaggtggataccgcatctgctggggaggcttccacgcaggtctgatcaggatccagttgtcagtctcccagatagattgtctgtgttctggttaaattttcatttattcatgcatgtgttttacaaaacaaaacccaaactgtgaagtgtagtcgtgaggctcagatgagtgatggggacacagacacccttgcccttgctcacttagagtctgttggggaaactgctttctccaaacactgcgcctgatacgggagattgccaggcaggaagatggaatccactctaaactctcggtgatcccacagtcattatcctctgacattgggctaagcgtgcaaagtgtattgtatctgtttgtgtgcttactacagacatgattaaagcaatgaacagagtagaaaccacaatgaaggaacaatgaaaaaggagtcagctgattttttcaaaagctacaactgcgaaaaatgaaagctatggtcatctatcttttatgatgagcagtgtgatatgttgtcatagaaaatgcagagaactgtgaaaagaaaaatcaccccattctcagaagcaccactgttaacatttcagtatcattcttcctttttctgtgtccacgtaagagagtgtataaaatagctggtatcagactgttgtgttgtcctaagttcttgtcatttatcatagcatcagtaatttttcacgtcattaatgttctgaaaaattacatctaatggctactttatattttagtggttataaatgaaccatagcttttcatttttaccagactttatttcataaggcatttaagatagtgtatcagttagggattctttttcacttgcaagcaacaggaaacctaatttgaacaaataaggttctcccctcacataagaaatctggaagtggctgatggggctgattcggcatttccacagttcacagcaggtgacctacgactctcttaaccaatcccctgtgcttattgattcatgcttgccaggtggctgcccagctccagcatcacatctgtactgtacgtggaaaagaaagggaaaggacagcacaagtaccacctgcccttttcttagaaaaccaaagctttcccagacattccccagcagacatcttacaactcactggacagaactgccttttctattcacctccagccacaagggaggatgaagaagcaaacatttcccttcccagtcacattagagtcaggcaagggagagaaggatggtagtaggagctgggttggccagagcacggtgtcagccacggccagccagcactgctcagggaactgttcatcctctaccagacatttctgtttccagtcattccttatgggtaacatcacaatatgccatgcacacacatttacccaagtctctgattatttccttagtaggatgtcctggaagtagaattagaggtcaaaggtattgttggattcatgtctctcattcttttccagaaagatccacacagatccctggtgtgctacaacacacagtgcctgaatgctggatgctcctgttcaggaaacactgtgtcatcctgtctctgggacacagccttggcccctgatggggcacaagcaagggtctggctggtggctggtcatcattcttgtaggttgcactcagaggtcgcaaggctcttccaagggcatatattccagtgttttgcagcccctgggcctaaaggatctggagcaggctcagctgctgtggtcagcttccccatcctatcatctggtttaccagttgaataagtagttatttggccccatgtttctcaacaggtgcacgataggcatttggggtgggacagttctttcccatgaggtcaccccaaacacggcagaacattttgcctccactggccccacagggaaacgccagtggcattgtccagtctgtgacgggcagcagacccctccctcatggtgctctgtgccatcagccgtgtgtggggagccagccaggcccctgtcccagcacctcgtgtagactgccttttagcaagaactgctggagcaagtatgaggctgctggaaggggtatgaactacccacagcggcctttcctcggaagcctctggaaagcacattacccagctactctgccggtagacagggaacaggaaaggatgcccatgcctgccccgtcctcagagccaggcctaggggaaaggcacagggagcaggtgtactctagagcccagaggctgctcttgcccgggaaagcttggcaggtggggctgtgggaggatggagggagcctgctggagcgggatggggagggggatgttgggaagaggtgacagccattaaaccagggcatggcaagggggagagagaacccagggcaccggtgtaggcctgagatggccacccctgaggggactgtgtaggcaaggggcaggtcagcaggcagtggccggacggagcggggctttaggttggagaaacagcatgtacagaggcctaaaggtggagtttcaggcttcagcgtggctgggcccaggtgctgatgggtcttgcatgctatcatggttttgtcctgtgcagtgtctgcccagacgcctgggcaggtaggggcatagatgccattgggggcctggtcccagcccagagggacacttggaggagaagcaggaagtgaccccaaattgttcccagacatccctcctgggggtgactgggtggtttcaagtgcagtaattaagtttctaaagtaaaacatcctacctccttagaacacaagaaaagatgccagccacaataggagatgagaggctgggaggatgcgtgagtagtccgctttctctaagagctccaggggtccaagcagaatgttgggagtttgttctaagggagagttaacattcgtctgtttctttagattgttaatgagtagagttttcttttgttgatttgcctttgaaccaattcataaaaattaatatttaaaaaaaaatttttttgagatggactgttgctctgtcatccaggctggagtacagtggcatgatctcagcccactgcagcctctgccttccaggttcaagcaattctcctgccctcagcctcccaagtagctgggactacaggcaccctccaccatgcctggctaacttatgtattattagtagagatgaggtttcaccatgtgggccaggctattcttgaactcctgacctcaagtgatccttccgccttagcctcccaaagtgctgggattacaggcgtgagccaccgcgcccagcctgaaatattttaaaattgaaaatgacaagtgttttctttggttccactggagactgtgtcctcacagctgagactgctttcctcactgcaaagcatggagctgtttttctgttcccattcccagcatccagcctgttggggcagcagcgacacgggatgccatctcatcttcatcccgtgtctgtgggcactgctgctttcttagcaggctggcagtctcacctccctccatccctgtgtatgaccgtggtccctgttgtacacaggctgagagaggaagctgcctgcctggggatgtttacctaacacttgctgaattgggcctgggggtgggcctgcagctggtaccaccccctccttgggctgccttcttcggagtcacacttctggggcaggtagggctggtgagccctgcccaacacccatgggcactctgacccagaggatccatgctatctcccacactggttgggctccactcacttgcaccctgactgagtctgggcgtgctgtttctaccctcagacatctgggtacccacgagtgctgttgagtgacggccactgaaggcccggctctgctgagctggcccctggtcctcacaggatcctcaagctcggttcaccccaagtgcttcctctgcccccatccagcaccccttcagctctgcctagaatccagtgtgggcattcggtcaggtgaggtgatttcaggtggtcgtcagtggatgctgaatcatgtgtgagaagatcattcctttatcaattctgtttctatcctaatagtggccttggagaggggcttggtttgatactagtttgtttaacacctctccaatactcctcatcttcctctttgtaacaagagagcttacatccagagcttttggcaagcaatatcccatagactgtatcaacttcattgtcatcaaggaatttattcttttttaaaaaaggggagtaagtctttatttccttacttccaaaataaagctggctgagttggaatatatttactcttaaagctaccatccattgaaggtattagtgccgattttccattgacagtagtaatgtaaactttcctagttgagataaatttaagcataaagagttgatgtgaagacagaaaaagcaaatagtagaagaggtatcagattaacatggcagaagttctgaaggtggcatgggcatggggatggcagcaatttgggaagaggttgctctaatcccacctgaacagaaaggtcatgattcagaagtggcctaaggggccgcagagccccagagctcctgtagggtcagcctcagggagagggcttgagcagtctggaggccagaggagggcattttctcttctggctctggcttcctcctctctgaaatgaagagtttaacctgtggttcctcatggacgcttgcacttgtgtagtgcctgctcgtccaggtcctggggagctgcgatgcctgtcctgtggagaagctgcccatcagccccatcccagtaccatccaggccgctgccgccgcccatgggtgcggacccggcactcagccgttgcagcccggtgttcatgagcattttcctcttacaggttaggaatctgaagcaatgggcgactggagctttctgggaagactcttagaaaatgcacaggagcactccacggtcatcggcaaggtttggctgaccgtgctgttcatcttccgcatcttggtgctgggggccgcggcggaggacgtgtggggcgatgagcagtcagacttcacctgcaacacccagcagccgggctgcgagaacgtctgctacgacagggccttccccatctcccacatccgcttctgggcgctgcagatcatcttcgtgtccacgcccaccctcatctacctgggccacgtgctgcacatcgtgcgcatggaagagaagaagaaagagagggaggaggaggagcagctgaagagagagagccccagccccaaggagccaccgcaggacaatccctcgtcgcgggacgaccgcggcagggtgcgcatggccggggcgctgctgcggacctacgtcttcaacatcatcttcaagacgctgttcgaggtgggcttcatcgccggccagtactttctgtacggcttcgagctgaagccgctctaccgctgcgaccgctggccctgccccaacacggtggactgcttcatctccaggcccacggagaagaccatcttcatcatcttcatgctggcggtggcctgcgcgtccctgctgctcaacatgctggagatctaccacctgggctggaagaagctcaagcagggcgtgaccagccgcctcggcccggacgcctccgaggccccgctggggacagccgatcccccgcccctgccccccagctcccggccgcccgccgttgccatcgggttcccaccctactatgcgcacaccgctgcgcccctgggacaggcccgcgccgtgggctaccccggggccccgccaccagccgcggacttcaaactgctagccctgaccgaggcgcgcggaaagggccagtccgccaagctctacaacggccaccaccacctgctgatgactgagcagaactgggccaaccaggcggccgagcggcagcccccggcgctcaaggcttacccggcagcgtccacgcctgcagcccccagccccgtcggcagcagctccccgccactcgcgcacgaggctgaggcgggcgcggcgcccctgctgctggatgggagcggcagcagtctggaggggagcgccctggcagggacccccgaggaggaggagcaggccgtgaccaccgcggcccagatgcaccagccgcccttgcccctcggagacccaggtcgggccagcaaggccagcagggccagcagcgggcgggccagaccggaggacttggccatctagtgcccgggtgcctgcctccagacagctgtgtagtgatctttttcttagaaaccaaaaccaaagtgcacttcccaccagcagatagaacctgaaagtcccaggaggtgggagcgactggagtcccaggaggtggacgatggaggagagatcaggtttccgtgttcaatgcttgctgttcttagcactgtgagttacagtggggataactcccactttctgagtttgggggtggcggggacaagggttgtgggcctttaagatcttcacagcagcccagaaatctggtcgctgagggctgtctctgggggtaactgttctgtagtggtaaagcaacaggtatcctgcagtccctttagctcctgggcaattgggtttgctattcctaagctctccagagcctctgggcggcccagagggtcttagctctgggccagagcacttagctctatctctttgatacttttaacttagagttgaatttcatttgggatatttgccaaactgcactaaaaaaagatttacagcaagtctatgtagtgtcatttgagtttccgaaattgcatgtgaagcccaggatatcaagcttcaggcctcatgacaagtgacaaagagcagttgccctccagaggcaggctcagtgggcaagggccccagaggttgctggcagaaggcaggtggaaacgcagccacgcctgaggccatttttaaacagttgaggaaattgacataaaagtgtgtcgggtatgccgtaggtatttattttctaaatgattattttgtgctttgaatggtgcagctatgcctattttctcccactttctttcaggaaaaatgaaagaaaaatagtgtttttctttctttaaatactgttagaatgattgctgaccaagacagtgctaatttgccctaatgcatgctactagcatctttactaaagattttgaactttcttgtaaaagaaattctttaatttcatgagtcacctaattataatgagaatgtattatataaaacaaaagcaggggaaagttttaagtgcattcaaatagaagttctgaagattttgaatgggaagtgaaaagtgaactactgttgccaggaaaattatttatacagatgaatctatgacaatctacacttttaaaaagtacagaataaaacacttcaagcttcctaatcattctttgtgggcagcctgtttgctttctccagtgtaaataatataagtgtctggggatccctgcctgggggagggcgcgtgctcatgcaggctgtatgccccattctgcctccacaccagagctgtcctgacagggaaggctatttatgtgtgtgggcatggctggaagacggcagaattttctgtcctgcacacacagctgtagtatcttggtcaccatttgtttataaaatgaacgatggtcatgttgagcctgtttctactcacacttttcacctccaacttctactgagtatcattagcccttgttcagcgagaccaatgtaatacatttctttttataaattaacttctcgatgatgcatttgggaccacactccaaacatactttctgttttctatcataaagggtgctccactaacaatctgatgaaaggaatgcaatttccaagtctcagattcttgcatgcaactagtttttcatgtcagtcaaacacaaagaatttgttagtacattctgcttgctgtaggatgcactggacaggctcctaggcttgaaaaatgctaacttttccatacgtctcctcagagactttctcaaccagattgacaagagagaaattagccctttggaaaactgtgagtgactttctcactcctctccaggctggtgcataactacagccattctagatgcataacttctctccgaagttcactcattacatgcagtgtatgccataggcctagggcagcaggacttagttcttgtgagtgataagggctgctagaagatcctagtgtgagaagcattccgataaaaagctttggccattttagaaaatgcaatagcaatcatccaagagcacaagtacagctcaagtacaagtggatgtcaatacttggttctttaagttctaccataataaatgttcataacagtaacaagcttcttatttacccacaatttgattttgagtggggttggagatgagcatgagaactcaaattgtatctagtttttacattttaaaattgaatttagtcacaatatgtttatggaaatgccagtattgtaccattgaccatagtctagtgggtccatttagagtggataggagtgtagaattagattcacctacttgaaaatcactaatctataaagaagtgaggttttgcaatagaacagtgcctgtggtgttttttcaggttagcatactgatttcagttcatgtaagaaatgaacgcatgtttcacatccttttgctctttgaggtatccatgattctaaaggctgggtccttctctctcaggcagtgtggaattgttctctactcaactagtcctttaagacattgaaacatgcaataaaaatagaaattgcctctctctgtgggcaagattccagacctatttttttctagcctggaaatttcactgaaactattttgttcttgattcattagaaagttttaaaaaatctctaagcctattttaaaactcaaatgctatacctatagcatttgagtattatatttacatacatggtttttaagctgctgtatacaattacttcttatatccctgtttttataaaatgttaaacatcactatagttacagtaccaaaaatcattttttaaattctaaaactattacttatattatcactcactttctcctttttaaacttttaatggttattcttgtattttttaataaaattgacacgaataaatccttaaatttacaaaagaaaaatagcaagccagcatctttctcatttatcctggatttcttcggctctggacaagtaagtggataggtcatagaattcctacacaagaatacctggactaataactatgaatataatttaaacatcactttacaaaaaattaatccaatagggtttaggtctcctttcacgttaggctttttaaaaagtattattaacactttctttattttgtattactgaataaactccttttttctgaattttttgaacttctgatatttgtaacactaattcatgaatctccaccaaaataaatacttatagagagtattgcatgatttaagagagtaaatgtgttttccaaagatgaatagagtcctgccaccatcaccacccgccacccctacaaattgaggatatcctaaataacctttaatatagcatatggacattgtacatttaaggtcagggaaggcacttttcttcctaattttatattacagtgcaaatcttgggttgactcactttaaggtttctgactgcccaaaatattttttcccctttacgttacagaacattataataaggcaaacaagttagggatttgaataacactcaaagcaacaaactgtttccagaaagtaccatatttgaagctgtttggtgtgtaaatgttcatttagctcatgtatttacaaaactcttactaaaacttaatttttgtgccataacagtgtctttcctggattacattgtaactggaagtaagcattttctaaaataataaaagtgcccttaagtttaaa

SEQ ID NO: 24 - DNA, 2749 bp, Homo sapiens
agcagggctcccgcgggcgtcactccggccatcgtccccacctccacctgggccgcccggcaggcaggcggtgagtcgggggctaggaagggaccaggggcgccacctgctcgcgggaggccgggaggagtcttgggtcctccgatgccgggacgggggttgctgcggaacgcccgccgcgacagagccgcgctcacccaggtggccttggccaggctcccaccctctttccatggaatccttgtaacaacccgaggcgggaggaatactattgtttccactctatcgtggaggagactgaggggcccagaggttgttccttatccaaggggccgcagttactaaaaggcaagatttgaacccagggccgcttccagagcctggctctaaacagctttgcacttgggaagaggcacctcccccttgggaactttgtggcctgtgcctcaccctgcaatgacaattcctttcaagagtctagaatttgccagcatcagctttggaggtggaagggggtgggagtggaggtggaggaagaagacaggaccaaatgtccctcctcaagtggcaggtggtcattattgctgaccggtggagctaaaggatgatgctgccttcagctcctaaaaccccttccactacccagcccctgcaggctcaaagattagagtgaagccagctgggtaagatatgaggcggggagcagggacctgaggctttgagccccctaagaagcagaagataacacctctaccatcatcactagctcccactgtctgggggtagccagccttgggcaaaagggaggaagggcttagcccagctgcacaactttggataagttcctcaaattctgttcccataggcaaaggagcctcaactccacccagatttccttggcctgtgtccatcctggggcagtggctcggggacaagagggacatagatgtctgattaggcagggaccttagccaaagcagaatgagaccatacaaagaggtgggcagccatcatccaaaaatctgggttgggtcctgcctgcactgctgagtgggagcctccaggccagtccttccccttcctgagcctgggtttctttgtaggtagaacgggcgtggcagacctccctgcaggcttgttgctgggcgaacgagaaggatgccatgctgacacactgacgtgctctgtctccttgcagacggaggcccgggagccatgggtgactggggcttcctggagaagttgctggaccaggtccaggagcactcgaccgtggtgggtaagatctggctgacggtgctcttcatcttccgcatcctcatcctgggcctggccggcgagtcagtgtggggtgacgagcaatcagatttcgagtgtaacacggcccagccaggctgcaccaacgtctgctatgaccaggccttccccatctcccacatccgctactgggtgctgcagttcctcttcgtcagcacacccaccctggtctacctgggccatgtcatttacctgtctcggcgagaagagcggctgcggcagaaggagggggagctgcgggcactgccggccaaggacccacaggtggagcgggcgctggcggccgtagagcgtcagatggccaagatctcggtggcagaagatggtcgcctgcgcatccgcggagcactgatgggcacctatgtcgccagtgtgctctgcaagagtgtgctagaggcaggcttcctctatggccagtggcgcctgtacggctggaccatggagcccgtgtttgtgtgccagcgagcaccctgcccctacctcgtggactgctttgtctctcgccccacggagaagaccatcttcatcatcttcatgttggtggttggactcatctccctggtgcttaacctgctggagttggtgcacctgctgtgtcgctgcctcagccgggggatgagggcacggcaaggccaagacgcacccccgacccagggcacctcctcagacccttacacggaccaggtcttcttctacctccccgtgggccaggggccctcatccccaccatgccccacctacaatgggctctcatccagtgagcagaactgggccaacctgaccacagaggagaggctggcgtcttccaggccccctctcttcctggacccaccccctcagaatggccaaaaacccccaagtcgtcccagcagctctgcttctaagaagcagtatgtatagaggcctgtggcttatgtcacccaacagaggggtcctgagaagtctggctgcctgggatgccccctgccccctcctggaaggctctgcagagatgactgggctggggaagcaggtgcttgctggccatggagcctcattgcaagttgttcttgaacacctgaggccttcctggtgcccaccaggcactacggcttcctctccagaatgtggctttgcctgagcacagacagagtcagcatggaatgctcttggccaagggtactgggggccctctggccttttgcagctgatccagaggaacccagagccaacttaccccaacctcaccctatggaacagtcacctgtgcgcaggttgtcctcaaaccctctcctcacaggaaaaggcggattgaggctgctgggtcagccttgatcgcacagacagagcttgtgccggatttggccctgtcaaggggactggtgccttgttttcatcactccttcctagttctactgttcaagcttctgaaataaacaggacttgatcacaa

SEQ ID NO: 25 - DNA, 17164 bp, Homo sapiens
gaggaacaactgacaggctcaagagcaaaaagcgtgggcagttggagaagaagcagccagagtgtgaagaagcccacggaaggaaagtccagggaggaggaaaagaagcaggtaagagtagacttgaatttgaacagctaaagctacaagtggatatgaagtagccagaggaagggagcttggattctaggctggataaaaacaaagctctttctttctacctgtgagtttattccttacccctcccgctatttcctgtgatagtgaggtatggatatattaaaaaggaaggtttagcgaagcagcagataaattacttccttgatttagagggagatgaagaattgcgagtggagggcccttggggttccagcctacttttgtggagttcagtcctctgggggcatcttagaagtgggtcaccagtccattcccaagaacttttcttagagggaattggccctttaaaaataaaaccaacactgttttacgatgcttctgctaggcatggaatctttttcaaaatgcctttagcagcatctaggggagtgttttgcttttttttttttttttctccctaaggcatgttggatggtttaaaaatattccctgcttagtttcctgcagagtatcatgtccccgctgtgcagtggccacatgtgagagatccaggctgccacttgcagccggaggaaagaggcatgtgaaaccagcgaggaaggccaggaaagcacccactgaaggtctcctttccacttgtggtgtgaagtaggaggccatggggtagaaagattctgttagtttcttcctggacctttcttctgagcatgcagtgaaagagcccaaactcaggggctgggaggccttgtagcagacacatccccatgctgggcctcggtttcctcatctataaaatggggaatttgaagtagaaggttccctctggttccattcagcagtaacggtgtgtaaggctgtgattccataggctcaaaggcaactcagaaccactgaaaaagggaggcgcaacacaagaatttctcatcctgctctgttgctcagttttttccttattctccctcgcagtattccattataatagagggattccttgttctcactccccagcaaatcactggggctgctgtttctggaaaaaggctctggtgcaaagaggtccagctggctgcgtggggaggcagggcagtgcaaagagcaccgaacagggagtcagaagacctggaaccagcaaaactgaaggagagaagagaccaaggggagcgtgtggaggtgcagcgcctctgactgcctggtgctgtggctcatggctggggacaccagctggtatttagaggccttctaacctgacttttacatcagcaggccaagcagcctccatcccctccacccactgtccccagagtcacagccaagcccagcccagtccttgattcactgctctctagggacagctctgaactttccaccttcctgccaagttgcccggcggcagagctgtttggagcctgctcccctggctgtccctccaagccttttcctcactcagcacctgccagtgaggagtcccaatgaccacagtctgcagagcagagagtaccaggaggggattctgtggcttccaacccaacactctctgagcatccttcacccacacatgtgacgttcacagagccacagcagtcacagaatcaggctgccctgctttgtctctgccttggaaccccagaggtgtgcttgctgggctcctgaagctggtcactgttcttacatcttaactgcctcactcctgtcccctctcctagtactgcctaaggtctgagaacattagaactgaaagaggtctcttccattaccagcctccttctttggcaaataaggagaacaaggactagagaagggcatgactcgtaggagacgacacagtgagtcagggctgattgagttgggagagcaccctgccctgctcactcataccgagggctcttctaatgtccatcccccggctggattttcctagcctccatctctccctgagtctccctgattcttccacttgagtgtctctacaattccattttttggtattgactcccacctgcccacctgctcttcatcgtctacactggctgttcgtggggcacaggcagtggagggcactgccacagtgccgcctggtctctcaggtactggctgaccccacctcttaggacaggggacctgtctatgtggatcaatcaggacaggaactggatgacctgccgttttcagggacagggagacccaaggccaaagctctgcccccgtcctagggaaggactcacttactggggattccagtagctctctgtgtgaatgaactcccataagcaccaacctgggctcaagggttgagctggacaaaggggagagatgaccattttcctggaaagcttcagggttcctggaaaggaagctgacttccttactattgttggaagctgctggctcctggtgatgccagcttgatgcactttgagaataaattgtttctgatatattagtaaataatgggcaagtaaaatttagtattcaacagtccactgagagtcaggaggtcgcagaatgagaggtattgaaaaaatcacagagggaccttagagtttatctaattgaggggtagggccgaaggaagaacctgggcatttggagtcacatttggctaggattttagctgtgtgatcttggggaaattatttaatgtctcttacactcagtttcttcatctgccaaagatgctaataaatatcttcctcataaggttttatgaggattaaatattttaaatggctatcaaatagaaaggcttcctacgacatataattccaaggaggtattgctggttttttatgaccacagattttttttttctaggactccttctgctgtcctctaagctagaagtcagaaactctggacttgtttcttggctttgccactaacttgccatgctatcacaactgggcaagtcacagactccccagatgttctaacttagagatggaagagcctctacacttttgtttcacatgtgagcaaagtgaggctcagggaggggaaatatcttgtctaggatcacaaagaaacagctggaaccagaaaagagcctctcttcatgaaatgataacattgcattttcacaggggatttcccgaatcttactccaacctggcaactccatgattcagaacctcaggagaggacagaggtggctagggatcaagatgtcccttaccctcagatcacagagtagacaaccccctctttctcttccaagtagaactgagcctgcttcaaacctctcattgtgagtgtgccttctgcttggtgatcagattcaaaagtgctgcagcttctcagaagagaggcatcccatgaggcatacattttataatatggagccatgtggagtccaactccaggcccaaaatcttgagttaaggacacattaggaggcatgctggacttgaaacaggaatgagagtggcttaatttgattgggccctacacctccctgattctccagacttgacccaggaggtctggatgccttgtgagataactaatttgtagacaaattcctatactttccattgtctgtgtttttcccatctctgacagttaccctcttttacctgtgccacatgagggtccttgctgtgtcactaaccagcctgaagcactatcagattctgcatcaagttggctagttggatcatgtctgagaggagtttttactggaaatgtcagaaaagaaaacaaggaactaatatcattgagtgcctatatgccagatactgttctaggtgactccacatgtccacacattacgttatccccatgaataaacattcctatttgttagatgagttagaaattgggaggataagtgacttgcctagggttacactactagagagtgatgcaagcagggtcctagccctactagtccttagagaccggaagttcctccgcctaataattgctgtttctgttgttcttgttatgatttcacatcaatggaacaccagagcctgctgtttggccagccaagaaccgggcagtagacactgctgcagccaagaacacttgctggctaaaaaaggaaataactttctatatgtgaattctggccaaatgatggcagaggccgaagagtctgggaatcctgaccactgtgggctgagggccccaatgtaataattaattctaggaacagcatatgtaagggatggccagccagtaaggcagaagctaaaaggaaaaacgctgggtctcttctgaggcaaggtaaagtgggaaaaatagatgatgataactctgagagttaagagactggagttctgggcacgggcttatcatcatctatcagtcctagtccttggttttctttctcttgtcagagatgtagagaggatgtgggctttagagttaggctagctggattcaaaccctttatgcagcatttgccagttgtggcacttagtacaagtacttagcctctgagcctcagttttttcatcagtgaaatggggcaatactactttccttgcagtgttaatgggagggttagaaagtatagttataaagggcttcacacatgggaaatactcaagttagtgttgttatcactcttactttacttccttggacccttgtcatcttgtttaaaaataaggagttgagtttgattgatctctacattccgttcagctctactgcactataaatctatgacaaatggggaaaataataaagaaatgtgggtattataattttcattagtaattaattgcatgggtactaagttacccccttggagcaattaataaggacctaccaatattttgttgacatttaatatctccatttactactccctttctttcacttttcatattttttcttccaacagtttaagaaaattatttatcctagcacgaatctctttctgcactttactcccttctacttccttggctttgaaacaactgtctgccagcagggtgtctctgagtggacccatctgttcttgccagaataaaataattaaatttaaaaaggaattaattatctgccattggtgccactggccagagtaagaggaagactgaagtgagtacttcatctcactcatctcttctcctctcttatctctatcttcctttcccctctacaatgaacaaggttcagggatgctggccctcagtggacttctaattctgaggaaggtgcccacactgcccagctcagtagctacagttacatcacatgcctgatcatttctcctgaggctgaagtagttaccccaaatgtaaatcaggaaaagaatgaaaatcctaaatgtaagaattagcaccagtcacctacaatcaactccctatccgaacaatgatctcaatgaacattcctgcttcaatcatcttatataaaagtggccagcctttgactggttaggattttccaaagaaggaacttcaagtgatttagatagagtttagcacagttgtcaaggcagggacactgctgtcagatgagctgggagctcttactagcagtgtgatcttgctcaagttaccctctctgagccctgtaacaaaagatgagaggccagccatggtggctcatgcctgtaatcccagcactttgggaggccgaagtgggtagatcgtctgagcccaagagtttgagaccagcctgggcaacaggacaaaaccccatctctaaaaaaaaaaaaaaaaataacaaaaattagctgggtatggtggtgcatgcctgtggtcctggctacttgggaggctgaggtgggaggatcacctgagttcaggaggtcaaggttccagtgagctgtgattgtgtcactgcactccagcctgggtgacaaagtgagaccctgtctcaagaaaaaaaaaaaaagaatagtccccacttcctcaggctgttgtgagaatcaaatgaaaacagatatggaaagacacttatagagtgtctggcacatagaaaggtgtcagtgagtgttattttatttccattattattattatcacctagatccaaattctttttttgtgtgtgtaactgggtaaactagaagacgtagttgggaatatcaaaggataacaaagattactgaagtagctgaggatcaagaccactttctcatgcaattctccctacatacccattttaaggagaaattattggggtgagaggaaatcagaaaacatgtacacaaattaataaggtacaaaagacttctgacataaaggttatgcttggtgctttgctttataaagctaccttgatgtctgacatggcagaggagctcgataagcactttctgaactaaactgcactgatatgatactatttctcaggcagcctttcagtgaggccctttgggtcctttcacaacagaattttcttaattgggaagcaaatgaactctgccctgcaccacattccactgtatggtgagtggaattatagcatgggcccagggggttgttattattactatgaataacaacctttatggagaaccagagatctgttagatactgtccagaacatgtgtcgttgtccagaattagactcagactctgtggagtggtcttgtcatctaattttgacaagcttggataagttccccagtactatgaggggaggaggcagtgagagagtagtccacagtgatggaatttctgcttgagacacattcattcctgctgagagaacggctctgtcacaggtagaagaaacactcagtggcttccatctccctggtgttctggtcaccatcgtcattgggcaggtgtccctatgccagcttcccaggcaggcccctccactgacatgcagcatggccccaacgtgttgcttggcctctgtgtgcattctcatccttttcttcagcaaccggtaaataattgccttgatcaatttggcattaggtgttttgagagacctaaatgctatcaattcatccatcgttgtttttataaagtacataccacactgtgcagggtgtggtattgagcactaaggggtttggggtggagggaatttcaggaggataatacaatgatgaacagaaaagcagtttgtcttcaaagagctcagggttgagtgggagagagaatacatggcctgtagagcaactaattctcaggtgtgtgagacctccaaggctttacagttcagcccaaggcccagctgctgacttgggggacacagaaattattgtaaaatactatattagaaaggctattatgtgtgactccacaggacagaactggaatcaagagaaagaagagaattttcaaggcatccctatggtagggcctcactcactagcaatataccttcttaagcaggagagacgagggtgcagtcacagcaagtgtgctgggaggtacctgtcatctgcagcctacctagttgatgctgcagccactactaaaagactgctacaagcatggacattactaattgtgcagtcctttacatccccaaccccatttggaggcttcagattaggccctcaggagcaaataatggactaagcatggcctatcatgtgggttgagaatgactccaaactcctaggcatggctgttaaagccctccacaatctgctcctgcctgctatgcagactctccttccatgctctgctcattgtactctaaaaccatgctggttttcatttcaatgaatttgttcatgcagtcttgcctttgtctgaaatcccctcatctcttctgcaactcctccatccactccacacccctacagacatcacatacccctaactcctacaccagagttatctccactgggaagtcctctcgaaggtctaagaattgatgagctccactcttggaggggagatggaatgaaactttctggcatgcaccagacttgaacagaaactctggaatgaagccctggttcttcccccattaattgtttatttgaacgaatcacttttatatgtttcctcctctgcaaaacacaggcaataacaatcaccccacagagtggttatgaggattcattcattcaacaataaaaattgaatgtctataacattctgaaggtattcggtcttgaacagaacaaatatgatcctgctctcttggaaccaacaagagaatgtagaagcacattttgaacagtatgtaagcttttatttttatttatttattgtgaggttttatttttactgctgaccttaagaagaaagacttgagcctccttaggacctctttgcaatcttactgctagccaaacattttcttcaatcattaagaaagcatttattgtgtaccaaatgagagaacctaatgcaataagaatgcaaagtagaagacagggcttttaactttgagaagcatactacccatttgagagaaaaagctgttaaatacttgacagaaggaatcatgcctgactttattaattttttttttttttttttttgagacggagtctcactctgttgcctaggctggagtgcactgacgtgatctcagctcattgcaacctccaccgcccggattcaagcaactctcctgcctcagcctcctgagtagctgggattacaggtgcccaccaccacactgggctaatttttgaattttattagagatggggtttcaccatgttggccaggctggtcttaaactcctgacctcagatgatctgcccgcctcggccttccaaagtgctggaattacaggcatgagctaccacacccggccgattttattaatttaatagacaccattgagtgcccagtgtgtgtcaggccttgcacctctttggtactgttctcattactcagaacagtggtaggcacataaaggggactcagcaaagtatctgcaggttggctgatagacaaatgtttggaaaacaagtctaaggaaatatataaccaagtgtgaggatgtatcctccatgctggatggtaattaaaattgctaccatgtaccagatgctcagtcttctggagttcaggggacaccaaagagggctgaggtcaattttagaagacttatccattttgctgtagatttgcggagtcagaggaagaggttctggctatgagtttatgattaatctgggttgctctgaaatgattttctttgaaaaacactggccgtgtagggggaccacgagaaggagcactgggccgggcatggtgggtcatgcctgtaatcccagcactttgggaggccaaggcgggaggatcaactgaggtcaggaatttgagaccagcctggccaacatggtgaaaccccttctctactaaaaatacaaaaactaaccaggtgtggtggcacacacctgtaatcccagctactccagaggctaaggcagggagaattgcttgaaactgggaggcagaggttgcagtgagctgagatggtgccactgcactccagcctgggtgacaaagcgagacttcatctcaaaaaagaaaaaaagaagcactggattcagaatgtaggtgcctgagctttatttctggtcattggccatacagtacatgaaataaaatcataaaatgattcatgctcactatacacaaaatccttcctctggccctcttcctcttatctaagcaccatgttgctattgccaaacaagtttcctagtggcccctccaaaatttgctttatctcaggataggacaagttgaaagaggatgttgaaggtttgggagtgaagaacctttagagttgggatggttctcttccaggttctagggaccatctctttttgccttgctgatttcagaacttgtatcagtggcagagggctttagaacgcaattccctaggactctccccaaaacccaaaaaccagattcaggctcctgccccacattcccatgacaccttatacttcctttatgttaacacacattgtgttttactgaaatcatgtatttaatgtctgctgttaataaaggggtataaaggcagttacactcagtgaagtcagggaatcccttgtttgtttcccctccttcctgctgtatcctcattgtccagaatgatggctggcaccctgtagccactcaataaacgtattaaatgaattttaaaaaggacattctaggcagagggaacataagaagccaagataaatgggtgagaaatggtgagatgcacataagtacatgtgaaattgtgtagcttaagtattgagtgtgtgagtggaaaagtggaaaaatgatagcataagactgtacagggtttcacatggcaagttaagcagtttggactttctaagtggtaggaagccagtgaggataactgctaaagcagtgaggtaaattgccattgtgtttgatagcatttattcatggcatgggcagcttcctttgcccctcctaatacacttcctgccaagaagcagataataatctacaaagtattttatatgctatacgcccagtaaactcactgagtatctaatctacaaatttctttggctgagatggggtatccaaagggagccaacgtagctggaaaagtaactacagccagagacctttcacattataaactgagcatctggtacatggtagctattttaagtttctctgaccttgcctgagcgtcagcaggaagtcatacatgaaaaacccttcaccctatttcctctgcctgggcccaggaggtctgcctcacccctatacctcctcagatagtttctctttttccctcccaataagatatccttcctaatactgcctttctggttttccaaggtgttcctttcttgtatctgtgctttacctcttccaggtggaattccttggacagcagtgaaggagtcagcagtcaagcctcttggcagactagaccaaagggtcacattctttgcctggaactatttttatacttccttggggacttgcaaggaatgagtgacagagtgagaagatcaagggagaagtcttcagggactgagtgtggaaaacttgccccaaatcctggaagaatatgacatttgtttctttttttttctatttccattttcctctcatttcctccccttctactcttgctcccatttcttttctcctttgtaatgcacctttctctactttctgctttctctttttccctccttcttctactctcatccttccccactgctcttgttgctagtaatggctaccttttattcagttcttatttgctgaacactgtgttaagtgctttgcacgcatcatctcatagcactctatgagttaatagtatgtccattttgcaggtgaggaaagtggaacacagattgaatcatttatctaagcccagcagatggtaatagaaatttgtcaaacctcagtaagctaactcctgcatctgtcttttcttaaccctacatggtctttttctccatttccaactctcccttgtccttcccttttcttctcttctttttattcctccccttctctccctccctctttttctcagacatttaccatagttcagtcactgcacgtgtgtggctgaccctgaaggtgctgaacactgtacatgtgcccagaagagaggacagacaattcaaactcttatctaatcagccattttccttttgagcacatgctccacaattttccacatttggaggctgaaagagggggcgcttcgccacctaaggaaatggggcagatgtctgatcacaaatgacaggaaaggcctcaagacctgcatgggtctttgatatagagaggagcagagataagatgctttccgctcactcaggaactccctcattcccagggacactgtatactctcaagtttggggacctggggtctgagagaatacagggccaggaggttggtccctgtcaaggcaacaatcaactcaagagctgaggaagcctggactatgaaatgcaccaccctgaccccatctttccccataagcatgaagaatgttcagacagaaaccaggagcacgttggcagcaaagatatgacggtcaaagtttgaatttgacaaacctctaaggacccacccaaatctgaggtttatgattctaagaaaggaatatttatgctccattccctccgagacgtttgtcatcctgttggttaggaatggttagaggcttaaactgtaagaacattcgttattcactaagtaagaattctggaggtagggagcctcaagagttgcttcagaggcctcagggcactggttgacatttctgagattctctggacagctttagacatcttggttcatacaactctgtccacaggcaggaagcggtggggctaagtgaggctcactcctattcaccgggggatgggagcactgtgagtagtctccctcctgttcaccaggggatgggagcactgtgagtgaggttccctcttgttcacagggggatgggagcactgtgagtgaggctctctccatttactggggggtagaaaaaccttttctggagcattccctctactttagattctccccatacctcacctaccagaactaactgcagaggagattaagaaagtgatacctggctttttcaccctgccaatgggaggcaggcaagaaacagggaattggttttctattgggtaggaaacaacagtgcctgtcagcccctccttcattcactcaactaagatatattaaacacctactctgggccaggctctggtgatacagaagaaaagacagtctccattttcaaacagtccctcctgggagaacacagacaggcagaggattacaacacaaggcagcaagcactgggagacgagtaagtgtcccgggggccatcacaggagctgaagaggctcagcttgagggaggagggagggctggaggaggcaatgactgggttaagttttgaaaggtaaatgggattcagctaggggtgaggggacatgtaggggtacagaaggagggcatttgggaagacttggcatggctggacaaaaggaactcatgtggacaggcaggaacaggctggaaaagcagacaaaggccagatgagggaggattttgtaagggacataaagttttgggacatttattctggacataagggtgggcagatctgtgtgtgggaaccttatttaaatgagacacagaaacttagcagcagggcgagctgagctgtgtggctggaatggctgtgttgcaccgaggcatgggagatcaacattgccttaccagccaggggaagtgagcactcatctgtgatactgttagctggtgtgaccaaagcacactttttgtttgccacctcccaacacagctggtccatgctggatggttctgatttttgcagagtgcttcctgaggggccaaatttgccaatcccatcctcactctttcctcctccacctagttctgccctctggagccataaaaaaattccttttccatccaacagccatttaaacatttggaacagttgtggaatgattttcagaatatcacacacctcatatcatttaatcctcagaattctctggtgtagctattcccatccccattcgataaatgaagaaacagactcagtgaggtaaatgcccagagtcacatttgcagaccccagtcttgtgttctttttaatactcgtgtttctccaggtgcggtccctcaccgcctgcatcagaattacttgggctgcttgttgtaaatccagattcctgggggccatcccagacctcctgaagtagaattactggggcaagagcagaatccatattgtaacacacaccacgatttctagatccgttaaagtgtgggagccatgctctaattttgctaatatggctactttgaatcttctctttctttttatttttgctgggaaaggagagcgagcttttcgttggttgctttgacttctaagttgcattttcttaaagaacccattggatggatggatcagtggaatcccagaacatgatagacattccagaccttcacagaacatccttcttcttttctctctttctctctctcccatttgcagaagttttggcatctgttccctggctgtgccaagatgggcgattggagcttcctgggaaatttcctggaggaagtacacaagcactcgaccgtggtaggcaaggtctggctcactgtcctcttcatattccgtatgctcgtgctgggcacagctgctgagtcttcctggggggatgagcaggctgatttccggtgtgatacgattcagcctggctgccagaatgtctgctacgaccaggctttccccatctcccacattcgctactgggtgctgcagatcatcttcgtctccacgccctctctggtgtacatgggccacgccatgcacactgtgcgcatgcaggagaagcgcaagctacgggaggccgagagggccaaagaggtccggggctctggctcttacgagtacccggtggcagagaaggcagaactgtcctgctgggaggaagggaatggaaggattgccctccagggcactctgctcaacacctatgtgtgcagcatcctgatccgcaccaccatggaggtgggcttcattgtgggccagtacttcatctacggaatcttcctgaccaccctgcatgtctgccgcaggagtccctgtccccacccggtcaactgttacgtatcccggcccacagagaagaatgtcttcattgtctttatgctggctgtggctgcactgtccctcctccttagcctggctgaactctaccacctgggctggaagaagatcagacagcgatttgtcaaaccgcggcagcacatggctaagtgccagctttctggcccctctgtgggcatagtccagagctgcacaccaccccccgactttaatcagtgcctggagaatggccctgggggaaaattcttcaatcccttcagcaataatatggcctcccaacaaaacacagacaacctggtcaccgagcaagtacgaggtcaggagcagactcctggggaaggtttcatccaggttcgttatggccagaagcctgaggtgcccaatggagtctcaccaggtcaccgccttccccatggctatcatagtgacaagcgacgtcttagtaaggccagcagcaaggcaaggtcagatgacctatcagtgtgaccctcctttatgggaggatcaggaccaggtgggaacaaaggaggctcagagaggaaagacgtgtcccttctgaactgatgctttctcactgtcatcactgcttggctcctttgagccccgggtctcaatgacgttgctcattaattctagaaactataaccagggctctgggatagtaagagaggtgacaacccacccagactgcagttccctccccaccctctacccagtatacgaagcctttcagattactcatgaaacagggtagagggaaagaagggaagcatggcaaaagctggcctggaagggatagccagagggatagaatgactctctctctacataccagcagcataccaaatgcgttctctaagttcctacctccttgacctgatcaccctccctcctccaaggaagagctcaaagttcccagccaatagacagcatgaatcaaggaacttgcattatatgtgctcttgaatctgttgtctccatggaccattcctcggagtagtggtgagatggccttgggttgcccttggcttctcctccctctactcagccttaaaaagggcttcttggaactttaccagcagcctcagctttacaaatgccttggtatgtacctctggcaaatgccctggtatgtacctctggcaaatgccccaccttggtgatgttgcaacctttccttctgctagggtgtacacctagcctgtgcaggtgtcagccctgctagggagtcactgtacacacaaactctactggaattcctgccaacatctgtcaccctgcagctcctttacagttcaatccaatgatagaaaccatcccttccctttctcccttggctgttcacccagccattccctgaaggccttaccaacaggaatatccaagaagctgttgtcctctctcgaaccctgaccagatcatcagccactgaggccagtggaatttccccaggccttgttaaaacaaagaaagcattgtacttctcagattccccttgtggaaaaaaaaattctgctgtgaagatgaaaataaaaatggagagaaaacactggaaaactattttcccctcctatttacttcctttgctgactgccaacttagtgccaagaggaggtgtgatgacagctatggaggcccccagatctctctctcctggaggctttagcaggggcaaggaaatagtaggggaatctccagctctcttggcagggcctttatttaaagagcgcagagattcctatgtctccctagtgcccctaatgagactgccaagtgggggctgtagaaaagccttgccttccccagggattggcctggtctctgtattcactggatccataatgggttgctgttgttttggatgaaggtaaacgatgcttggaattggaaactgagacttatagagggattattacattattaaaatgcacgtgtgtgtgtgtgtgggtgctgatgggatgggtaaaggcttggggagtcctgaaataaggaaaggaaaccacagagaaacttgtgtcttcctgctctcctctccggctgcctggcagttattaacctaaacagatagccacaagaggttgggacagaggagggtaaaggctcagaaggaggttcaacctctgactcacctgcccatctctgggccctctgctgacacttggatgctattgttgggtggaaagataaatgagagtggagaggtggaggaaagtgactaggatgccatttaggaaggaatgtctgatcatcccgggtccctggaggggacaccttttaatctattgcctagcattaatattttctctccttctatctctgaaatgttttatgaaatgagtgttcttgaattagaaattctgtgggatcaatctttgatggtgagggttttagaaaggaaaaatatagtaaaatgtgtaatttgtcttaataaaatctatctctacatcta

SEQ ID NO: 26 - DNA, 6476 bp, Homo sapiens
gccattttgctgctgagcgccaagagagaaagagcacatatttctccgtgggacactccttgtattggcaagttttccttgggtgatattagtttgtaaccttccccccaattgttctttctcagcctaatctaagggccatatataggcttctccaaaaggaaaaaggttgccaataagattcagtcttgggctgggatggctagacttacactccaactctgaaaaccctcttcaagttgacctaagaactggcagaggtttggaagggagaggaatgctggaataatcagcaggatggggaaacagagatgtccaaactcaaactacaatttgacttcttaagctcttttcatgtctacaggaatccacagggacctaaaccaagtatttgatatttatgaaaaagttttgtgcccttttcactcaaattctacaatagaaataatagtcataattactgaatgctgtgggggtagcggaggcttcgtgctcagcattttccatgttggagcatttaatggagcacaggaagggatctggctaaggaccataaaattcctcctaggagcaggttctgttgtctatctatgagaactgctggctagtggctgttctagaaactagaaaagaggcactttccacctggttaccaaccagagtggtaagtggccattgaacactttggataacttattaatggatgtatatgtgttattctgcctcttcaaaaccagaggagggctatgctgtaatgggcttagatctagaagaccagggctcacatcctagctctgccctcactagctaagcccccatcttggagactcatttcacctcccagcctgtctttttgtctggtaatggggattgataatgccaagttcactggttctcagacatccatctggggatctgtcagttctagctcaagatgaaggtttccacaacctgtgaccaaaatgtgacaatgataaagttaacaatgtagtaaatgtttcaccaagttaagtgtgttcaatttaaaggcttgtcttttattctgaagttatgtcctctctagttttgtggtgttaaaatccccttttatgaaatgatgatgaaaatagactgtagttgtagttagtaatttaataactcttttttttttttttttgagacagagtctcgctgtgttgcccaggctggagtgcagtggtgtgatctcagctcactgcagcctccacctcctgggctcaagcaattctcctgcctcagcctcccaagtagctgggattacaggtgccccaccaccgtgcccagctaatttttgtatttttagtagagatagggtttcaccctgttggccaggctgatcttgaactcctgacctcaagtgatcctcccacctcggcctcccatagtgctgggattacaggcatgagtcaccacgcccagccaataactcttatttttatgtccttgtttggcaaaataaggagttggtatccttatgttggtcacactagtttgttattattatactagtctgtgaaatctaagtctgagaaccactggcctagttcacagcttgttatgaggactgaaataagatacgtgaaaatgtatcacttagatcaaggatacccaaacataaggtgttattttaatcattacctctagccatcattttctggtgggatgttcctggccatatatggacaccctggggttggaggcttgaactctatccatttattttctatctgtaataggtctgttcactaaattttcacaagcaaaataaaacagagaattatctctgagaaagagaagagaaatagtcttcctttggttcagatttctccctgctcccacagaacgctttgcttctctgatctgacttcctttaaattttcactgttagaagtcaggaaaccaatacatttcccttcgcagctctaaagtgtctctccttaacagcacagtaggcctgtttcaacatcatggggttggaaagattgtgtcctaaattacagtttctctccttcagttatcacaagaaactgtaactagacatttaaaaaaaaatacaatcttagcatggcggcttagagtatagaaagacatgggcttgtttggctttggtttcaaaattactaatgagtggtcaggaacgacttcttgtgtcatgaacatgtatcatgacactcttgtcaagaattgttggccttccagtttatatatttgatctcatacaaaataagcagttttgtgtctcagagcagctggttggggatcaatttactatcctttttgttatttaccattttttacaagttcttaatttttctgctgttagctgtagcaagaggactgaagttccttggtctctagtattcatattacaggaatttggggattgagaatttcagatttcacaaggattactattagaaccatgcactgctgtctatggagctcccactctgtgaagggctttgttctgtgttgtgatggttcacaaaagatgaggccaaaatggttcctgccctccaaaaccttttgatactaaaggggggaaaacaagattggttaacatacaggactgagagcatgtgctcatcacacacattcatgtgggtatgtgagtgaaatacactgtcaaaaatgaactgatatatcaatgagggtaagtattagcaagatagttaagattcagtaagatattagtaagatagtaagatattagctaaatcttatagaagtacagttattcaaattgctgttttaacataaattttagaatgaactatttgataagaaatgaactttttcctggctctgccaccagtgagctttatgcttgggctgcttacctgattgtgatgtttcccacctattttccaaaaggcaatgggaatggctaccactcttaccagggcaattactagacttaactatagtctgaagagttaaaaatagatacatgtggctgggattgagttgctgtttccgattccgagctgctggttccttccccctctccattacccatttctccaaggaactcttcccaatgccagacccatgactggggatgccacagctgctgtcactttttcaggagaagagaagctgctgcaggatgccctgcctgattgggagcttatgaggcctcaagaggaggagcactctctgctctcccacaagaagcgaacagctattgtgcctgccctgacagcacaggctggacattgcagatgcctgcaattagtatcctgccaccaggttctgtctggccagactccaaatcacaggttggaaataggcttttgtgtttaacaaatatcactgtgattaaaaaacaataggcatatccctttagccccataggttcctaggcctatagcatggggcatggctagaagaagcccagagcaagatcctctaacatgggctcttgccctggtctgagggcagtgatgagtaaacttataactctagagatgttcaagctgcaggaacaactgttctccattgaggtggaagttttgctcatcattctttataggttacaggtttgcactggatgaatgacccagttgcagccagccccttgtcagctcaatgccatttccattagccattgctgtgctacaggcattatatactatcatgtttaacgatattttttctatagaccaaatttttgactctattaaaacagccatatgttacagaccctgaaacattttcattccataggacactaaaagtgtcctagaagaccttcctcatcctgtgacatgattccttcccaaagcattctctctgttctttggatttaaaagagtaataataaaaatatacggccctcaatgtgtaaagctattaataagggtttccagatttcaacctagagaagaggaaacataaattaagagcacagaagtcaaagaattgtgtagctttgattgcaggcagtttatctcaatggtgtagtgggaagaacccagcctttgtgatcaagcaaacagaactgctgctatttagctgtctaatcttggacaatatatttagcctctctgagcctcagatttcttttttcttttttttctttttcctttgagacagggtctttctctgttgcccaggatggagtatagtggcacatatcagggttcactgcaacctcgacctcccaggctcaagcaatcttcctggctcagcctcccaagtagctgggaacacaggcatgcaccaccgagcccagctagtttttaaagttttttgtagagatggggtctcactgtgttgcccaggctagtctctatctcctgggctcaagtgattctcttgccctggcctcccaaagttctaggattacaggcatgagccactgtgcctggccttcagttttcttatttgttggaatcaacttagttaacaaatacttatcaagttatcactgtgtgctgggctgtatgtcaggcattgagtatatagctgtaaataagacaggcatggctcctaccgtcatggaaattacagtctagcaggatcaagttaaatgaaataatataatgtcaaagttctttcacaaagttggtattcaataaatgctaatccccttccacttcccttcaaatatacgatcattatatattctgacactcaaacataagatggccacagacaatttcatacatacaagaattgtgttgggagcccagacacccatagtataagggaactcttcagcattatgtctcacgaaacttagatcagtgtgtggtcttgatttaaatccatgtaaccaagggtttctatttatggtcaacaatgaatccttatttttggtggactttaaggaattatacaaatattgcctcattgatgctttcagaccatttgtgaagtgaatgagaataggtattattattattaaacccattttacagatgaggaagcggatggaagcacattcttcggggccttctttgttctctagtcctagtctgcacaaaggaagcactggatagacgctgtgtgcacattgaccgttctggcaacttggaaaggagaggtaccccgcgttagcaaaaacagatattgactcagggttgcattgcggccgctcagctcttgccttctccctcatttcttcaggtgggtgagaaatgggcgactggagtttcctggggaacatcttggaggaggtgaatgagcactccaccgtcatcggcagagtctggctcaccgtgcttttcatcttccggatcctcatccttggcacggccgcagagttcgtgtggggggatgagcaatccgacttcgtgtgcaacacccagcagcctggctgcgagaacgtctgctacgacgaggcctttcccatctcccacattcgcctctgggtgctgcagatcatcttcgtctccaccccgtccctgatgtacgtggggcacgcggtgcactacgtccgcatggaggagaagcgcaaaagccgcgaggcggaggagctgggccagcaggcggggactaacggcggcccggaccagggcagcgtcaagaagagcagcggcagcaaaggcactaagaagttccggctggaggggaccctgctgaggacctacatctgccacatcatcttcaagaccctctttgaagtgggcttcatcgtgggccactacttcctgtacgggttccggatcctgcctctgtaccgctgcagccggtggccctgccccaatgtggtggactgcttcgtgtcccggcccacggagaaaaccatcttcatcctgttcatgttgtctgtggcctctgtgtccctattcctcaacgtgatggagttgggccacctgggcctgaaggggatccggtctgccttgaagaggcctgtagagcagcccctgggggagattcctgagaaatccctccactccattgctgtctcctccatccagaaagccaagggctatcagctcctagaagaagagaaaatcgtttcccactatttccccttgaccgaggttgggatggtggagaccagcccactgcctgccaagcctttcaatcagttcgaggagaagatcagcacaggacccctgggggacttgtcccggggctaccaagagacactgccttcctacgctcaggtgggggcacaagaagtggagggcgaggggccgcctgcagaggagggagccgaacccgaggtgggagagaagaaggaggaagcagagaggctgaccacggaggagcaggagaaggtggccgtgccagagggggagaaagtagagacccccggagtggataaggagggtgaaaaagaagagccgcagtcggagaaggtgtcaaagcaagggctgccagctgagaagacaccttcactctgtccagagctgacaacagatgatgccagacccctgagcaggctaagcaaagccagcagccgagccaggtcagacgatctaaccgtatgaagtgacgccaaa

SEQ ID NO: 27 - DNA, 7519 bp, Homo sapiens
atggattttagttgatggatgactcactcactacattcaactgaactgaatctgctctataccagcaaagggacaaattcagaaaataaattgaagatggccatgctgtaacttctaaacatggtttgcttctcagatttacctaaactaagaaaggtttgtgttaatctctctgttttagcttattaagaaagagttgtttgaaatgtttttatctttttcttttgaattctatggtactgtatatatgtataccagtttttatgtcatttgctatgaaagctttaatttgtagctaaatactactgctccttctttcaggaaatactatgtgttgtcctttatgaaaaaaatattttctttctttttatgattataaaagtaaaatgcttatagtaaaaaattaaaatacatgtaattacaatatattaagtatataatttgtaatcccaacatccagagctaatcaccgttaatattttcatgaatatccttctagacttttttgtatacatctgtaaatgtaactaaacttataataatggggccatattattctattttataacatcaatttcactgaaatgaaatatcaaatgccattttatgtatgtttatcatttctactggttgcatagtatcacaccgtggatgtagtcgattatttaaccagtttttcttgtattattattttatgtttttagcttatgactattataaacaacatgaattacatctttgcttacattattattatttatgaaccataaatgagacttaacttgcttactttttttttattttttgagacagagtctcactctattgcccaggctggaatgcagtggccagatctcggctcactgcaaccttcacctcccaggttcaagcgattctcctgcctcagtctcctgagtagctgggattacaggcatgtgccaccatgcccggctaatttttgtatttttagtagagatggggttcaaccatgttgctcaggctggtctcgaactcctgacctcgtaatccgcccgcctgtgcctcccaaagtgctgggattacaggcgtgagccaccgcgcctggccaacttgcttacattttaaagtgctttgggttgttgggtcagagtatgctattattattattattattattattattattattattatttatttttttttgagacagagtcttgctctgtcgcccaggctggagtgcaatggtgtgatctcggctcactgcaacctctgcctctgggttcaagtgattcttctgcctcagcctcccgagtagctgggactacaggcgcccgccaccacgcccgactaatttttgtatttttagtagagcaagggtttcaaccatgttggccaggctggtctcaaactcctgacctcaagtgatccgctggcctcggcctcctaaagtattgggattacaggcgtgagccaccgtgcccggccagagtatgctattattaacataataaagtcaatggaaagtttctctatttcaggaatacaactatattttagaaggttgatgcttttgcaaatcgtattaacagagccgggcgcggtggctcacgcttgtaatcccagcactttgggaggccgaggcgggaggatcacgaggtcaggagatcgagatcacggtgaaaccccgtctctactaaaaataacaaaaaaattagccgggcgtggtggcaggcgcctgtagtcccagctacccggagaggctgaggcaggagaatggcgtgaacccgggaggcggagcttgcagtgagccgagatcgcgccactgcaccccagcctgggcgacagggcgagactccgtctcagaaaacaaacgaacaaaaaaaacagaacaaaggctgaagaaaggaactaaagactctagaactagttatttaaaaagccaaagctatcactattttacattcctaaatttaaatgattaaacttaagagaaaacagataatctcttaatgtttctttccggcaaatttgaagtttgcttacagaggaaaaataatagtttagtaaaaaatttaaggagctgactctaaagccacaatgattgggtttgaatgccagctccagctgtgtgacctcaggtaaattaaggtgtgcttccgtttcctcatctgtaagatgggggaaacaacatacttaccgcataggattttagtgatgaacacatcttgtatcttagtagtttgtttgattgtgtaacagttccctttatataaaggggacaggacatacatttatattttaaatgaaaaataatgaaaatattcacttttaaaatctttcctttggggtatatttcctctgagataacctgggataccaaccttaatatgcaatctgccggcaaataatccaagcagctaaattataacttgccccactgcttccttcaagagagcagctatatgtcttaaataggtcaaatactgctacagtgaaagtttccataatactgccaccataccagtgaacaatctattgcaagtaatatctataatgagattctggtaccataaggccgggcgcagtggctcacgcctgtaatcccagcactttgggaggccgaggcaggtggatcacctgaggttgggagttcgaaactagcctgaccaatatggaggaaccccatctctactaaaaatacaaaattagctgggcatggtggcgcatgtctgtaataccagctactctggagcctggggcaggagaatcacttgaacctgggaggtggaggttgcggtgagccgagattgtgccattgcactccagcctgggcaacaagagggaaacttcgtctcaaaaaaaaaaaaaaaaaaaagattctggtaccataaaatagttgagaatttttggagttctttttgttttctgagacagagtttctgctcttgtcgccaaggctggagtgcaatggcgcgatcttggctcaccgcaacctctgcctcccaggttcaagtgattctcctgcctcagcctcctgagtagctggggttacagatgcctgccaccacacccagctaattttttgtatttttgtagagacagtgtttcaccatgttggccaggctggtctcgaactcctgacctcaggtgatccgcatcggcctcccaaagtgctgggattacaggtgtgagccactgtgctgggcttgaagttcattttaacgtaagaatttacaaaatttgggctgggcgcggtggcttactatgggaggccgaggcgggtggatcactcaaggttcaggagttcaagaccagcctggccaacatggtgaaaccccgtctctactaacaatacaaaaattagccaagcgtggtggcacttgcctgtagtctcagctacttggcaggctcaggcacgagaatcacttgaacctgggaagtggaggttgcagtgggctgagatcctgccactgcactctagtctgggcaacagagtgagactctgtctccccccaccaaaaaaaaagaaaaaaagtatactttttcatagtaaagtataataagtactttatacatattcataaatattactgagatgaatttctgaaaatgttcaccaattgccaggaagaaaccagaatttatttcaaatttatttcaatttggattaaaaaaactaatctaaattcctatgacagccagatctgtttcctctggtttcactgaatgccatatcttactgaattatcaaatgaagcatattcgttttcctatgtgtataaatgagatttaaaaatcactgactttttgaccgggcacggtggctcatgcctgtaatcctggcactttgggaggctgaggcgggtggatcacgaggtcaggagatcgagatcatcctggccaacatggtgaaaccccgtgtctactaaaatacaaaaaattatcccggggggtgttggcaggcgcctgtaatcccagctactcaggaggatgaggcaggggaatcgcttgaacccaggaggcggaggttgcaatgcgccgagattgcgccactgcactccagcctggcgacagagcaagactctgtcccaaaagaaagaaagaaagaaaaaaaaatcactgacttttcaagccagtaatggcatgttggggaaaaagaaattgactttgttataacttttatatcaaataatcttaataaataaggttaagatcaggttactagttttagaaacctttccaaaagttctgttgaaaaacaacaataggctgggcatggtggctcacgcctgtaatcccagcactttgggaggccgaggtgggcagatcacctgaggtcaggagttcgagaccagcctggccaacatggagaaacatcatctctactaaaaatacaaaattatccgggcatggtggtgcatgcctgtaatcacagctactcaggaggctgaggcaggagaatcgcttgaacccaggaggtggaggttgcggtgagctgagatcatgccattgcactccagcctgggctacagagtgagactccgtctcaaaaaaaaaaaaaaaaagaatataattttaggccatgcgcattggctcatgcctgtaatcccagcactttgggaggccgaggtggccagatcatctgaggtcaagggtttgatctcagctcactgcaacctctgccttccaggttcaagcgattctcttgcctcagcctcccgagtagctgggactacaagcgcctgccaccacgcctggctaatttttgtatttttagtagaggcggggttttaccatgttggccaggctggtctggaactcctgacctcaaatgatccacccaccttggcctcccaaagtgttgggattacaggtgtgagccaccccgcccagcctatattcttaatagagaatatatacactcctcctccaggtatcatgtttttttcattgtattgtgatgtctaaatataagtgattttaaattcctgacatttaagtatattattggtaacagattcacactttggccaggtgtggtgacccacacctgtaattcccacactttgggaggtgaaggcaagaggatcacttgagtctaggagtttaagactagctgcagcaatagagtgagaccctgtctctacaaaaaaataaaaaaaattatctgggtgtagttgcacacacctgcagtcccagctactcaggaggctgagaggggagatgatcgcttgagtctgggaggttgaggctgcagggagttgtggttgcaacactgtactccagcctgggcaacagagggagactctgtctcaacaaacaaacaaacaaagaaaaaaccccacagctatctagggaaaaagtaaagcaaccagcatatagaagtgacatattgttatattttcaccataggtttgctttaagaaatagtgctcccttcagaatggaagaatttatctgcctcttatttgatgtggatcagagctaagatggctgactaaataaacatgggggactggaatctccttggagatactctggaggaagttcacatccactccaccatgattggaaagatctggctcaccatcctgttcatatttcgaatgcttgttctgggtgtagcagctgaagatgtctggaatgatgagcagtctggcttcatctgcaatacagaacaaccaggctgcagaaatgtatgctacgaccaggcctttcctatctccctcattagatactgggttctgcaggtgatatttgtgtcttcaccatccctggtctacatgggccatgcattgtaccgactgagagttcttgaggaagagaggcaaaggatgaaagctcagttaagagtagaactggaggaggtagagtttgaaatgcctagggatcggaggagattggagcaagagctttgtcagctggagaaaaggaaactaaataaagctccactcagaggaaccttgctttgcacttatgtgatacacattttcactcgctctgtggttgaagttggattcatgattggacagtaccttttatatggatttcacttagagccgctatttaagtgccatggccacccgtgtccaaatataatcgactgttttgtctcaagaccaacagaaaagacaatattcctattatttatgcaatctatagccactatttcacttttcttaaacattcttgaaattttccacctaggttttaaaaagattaaaagagggctttggggaaaatacaagttgaagaaggaacataatgaattccatgcaaacaaggcaaaacaaaatgtagccaaataccagagcacatctgcaaattcactgaagcgactcccttctgcccctgattataatctgttagtggaaaagcaaacacacactgcagtgtaccctagtttaaattcatcttctgtattccagccaaatcctgacaatcatagtgtaaatgatgagaaatgcattttggatgaacaggaaactgtactttctaatgagatttccacacttagtactagttgtagtcattttcaacacatcagttcaaacaataacaaagacactcataaaatatttggaaaagaacttaatggtaaccagttaatggaaaaaagagaaactgaaggcaaagacagcaaaaggaactactactctagaggtcaccgttctattccaggtgttgctatagatggagagaacaacatgaggcagtcaccccaaacagttttctccttgccagctaactgcgattggaaaccgcggtggcttagagctacatggggttcctctacagaacatgaaaaccgggggtcacctcctaaaggtaacctcaagggccagttcagaaagggcacagtcagaacccttcctccttcacaaggagattctcaatcacttgacattccaaacactgctgattctttgggagggctgtcctttgagccagggttggtcagaacctgtaataatcctgtttgtcctccaaatcacgtagtgtccctaacgaacaatctcattggtaggcgggttcccacagatcttcagatctaaacagcggttggcttttagacattatatatattatcagagaagtagcctagtggtcgtggggcacagaaaaaatagataggggcagctctaaagaccagctgttaagacagacaactgcaaactcatttaagcaagagaaaaacagctctaattcgagattgtgaagcaacacttctaaattcaaagacatagagttgtcaaatcaggatttttttttttttaaatgatatcctttcgaatgtaactgattttgggaaaatcacatgttcagaattgaggctaaatggtttgatcaggttttctctttgaagagaccacagccttaggaaatggttcttgatctatacaattccaccttggacactgggttaattctgtttgcccctggaacacaatcacgtaagtttccttctagactggcatcctgatgtgtcttgagtataatcacatgttgctacctagtaaataaaatcttaagaaga

SEQ ID NO: 28 - DNA, 1652 bp, Homo sapiens
atgggggactggaacttattgggtggcatcctagaggaagttcactcccactcaaccatagtggggaaaatctggctgaccatcctcttcatcttccgaatgctggtacttcgtgtggctgctgaggatgtctgggatgatgaacagtcagcatttgcctgcaacacccggcagccaggttgcaacaatatctgttatgatgatgcattccctatctctttgatcaggttctgggttttacagatcatctttgtgtcttctccttctttggtctatatgggccatgcactttataggctcagggcctttgagaaagacaggcagaggaaaaagtcacaccttagagcccagatggagaatccagatcttgacttggaggagcagcaaagaatagatagggaactgaggaggttagaggagcagaagaggatccataaagtccctctgaaaggatgtctgctgcgtacttatgtcttacacatcttgaccagatctgtgctggaagtaggattcatgataggccaatatattctctatgggtttcaaatgcaccccctttacaaatgcactcaacctccttgccccaatgcggtggattgctttgtatccaggcccactgagaagacaattttcatgctttttatgcacagcattgcagccatttccttgttactcaatatactggaaatatttcatctaggcatcagaaaaattatgaggacactttataagaaatccagcagtgagggcattgaggatgaaacaggccctccattccatttgaagaaatattctgtggcccagcagtgtatgatttgctcttcattgcctgaaagaatctctccacttcaagctaacaatcaacagcaagtcattcgagttaatgtgccaaagtctaaaaccatgtggcaaatcccacagccaaggcaacttgaagtagacccttccaatgggaaaaaggactggtctgagaaggatcagcatagcggacagctccatgttcacagcccgtgtccctgggctggcagtgctggaaatcagcacctgggacagcaatcagaccattcctcatttggcctgcagaatacaatgtctcagtcctggctaggtacaactacggctcctagaaactgtccatcctttgcagtaggaacctgggagcagtcccaggacccagaaccctcaggtgagcctctcacagatcttcatagtcactgcagagacagtgaaggcagcatgagagagagtggggtctggatagacagatctcgcccaggcagtcgcaaggccagctttctgtccagattgttgtctgaaaagcgacatctgcacagtgactcaggaagctctggttctcggaatagctcctgcttggattttcctcactgggaaaacagcccctcacctctgccttcagtcactgggcacagaacatcaatggtaagacaggcagccctaccgatcatggaactatcacaagagctgttccattctggatgctttctttttcctttctttcttcctggggtgtgtatgtatgtttgtgttgacagagaggcagatggagggggagattatttatggagagataaaattattcattcgatacattcagttaaattcaattcataaaatagacttagaaaaatctt

SEQ ID NO: 29 - DNA, 10305 bp, Homo sapiens
ctggtggcatagggcagacacgcctgcagacattctctgggaaagggcagcagcagccaggtgtggcagtgacagggaggtgaggagactgggggctgagggaggtgggccagggagggctgatgtggcacagtgggccggaaataggggccgggtcttgccttctactgacctccgccttcagccacttaggtcccttccatgcttccctctgaagctggggtgaggcccctcctgccaggtgccagacttgcttagcctctctctgcagcctctttccaggttcaacattgcttttcctctcactttttttcctctggccaaagattccccttattcccatagggccagattctcaggaagacttgagggaccccctaggtgcaaggtggccaagtttgtctctctgagacatttcctgccacacagggttagggtttagtgggaatgttgggcactgccaggtgctgttttccttccttgattacaaggcaagccaggcatgcacccaacacggggctgcgagtggatgaataaagcgtgctcagcgggctgcagagggctagccaacagggccaaggatttgggagcgtgtgtttccactttcttgaaggaggcagactgactcaagctgaacttggagtaattgatggttcggagattttttttttttttttgagacggactttcactcttgttgccctggctggggtgcaatggcgcaatctcggctcactgcaacctctgcctcccgggttcaagcgattctcctgcctcagcctcccgagtagctgggattacaggcatgcaccaccatgcctggctaattttgtatttttagtagagacggggtttctccatgttggtcaggctggtctcaaactcccaacctcaggtgatctgcccgcttcggcctcccaaagtgctgggattacaggcatgagccaccacgcccggccggtttggagatctaaaggaggggtgttccccagctgtttgaaagttgttgcagctgttgggaatggcacagcagaatgtgtaaacttagaaaatgaaatgaggagaggagaatacagacaagaggggttttaatggagagaagtatagattagaatgcagcctggcaatggaaaagggacccaggcttgggtgaggggccaatacgattcctactctgagctccagcacttgcttaccacctgtgtagtaagttactcagcttctgttagccttcattgcctcacctgtgagttgaagacaatagctcctggctcacggggttgttgtgagcgtgagagtctgtgaatatacacacagggggcactccataaatggcagctgttataataacccaagcagagagcaacaggaagtcaggtgggtgatggaggagtaagggagtagcgtccaaacaatggggaagggagctggcataagcagaagctctctgaaaagaccgcagcagagagggggaaagaacaaatcggaatgagctagactggacctgacccaagcctggccacggaatatgtatggcagggtggagaggctaagtccagtgactgagatattgcagaactgcagggtggaggcaagagagagaagcaggggaaggggaagagagctggaggagtttggccttagccacaccaaactgatgaaggcagccagaaattcctaaggaaatctcaaagaaagccccatgtcccttcctgaccagtgactgcctgcgaaatgggggagggagcatggagtccgaggctgaatgtaacctcatccatcccagcccacccctcttccccaaaccccaaatcacaaggattttcctgtagttggaaggatagggaggaggtgggggcagaaacagagagagacagagacagactagacgaatgtgtgtgtgtgtgtgtgtgtgtgtgtgtgtgtgtgcgtgtgccagcacacgcaggaaagtgtataggtttttgaatagtaggcctggtctcagaatgcaaactccttaaaggaagagaggccgccataagcagcgccatatacaaagactttgaggtaagaaaataaacttggaacttgattctaccatttagcagcagtgcaattgccgttgaggcaagtttcttaacctctctgagcctcaacttccttgtctgaaaaatggggataatattacaggactgctgtaaggactaagtgagatcacctgattttgcactgtgcttgagtgctagggcaaatctaaatctggggacagggccagagcctgacaaggccagagaagtcctgtctaattaaacatgagagcaaaacacgcgtgcagcaacaccgaggatatcaatacggggactttaacccgaagtcacaaaaacagtttggatttcaaaatcaggtcactcccctggatgtttttagaatgaaatccttgaggcattgatattgacatagggatcagttctccttccaaaggtaacagcaaaaattgagatcacagcacccagacaagggtccttagaggccccacagggagctactggctatgtcccagaagactcaagaagaaaaaaggcggggagttacaagaacctagaaactcaggggtggccaggatgtctgtggcacacccctgaagggcagagaagagaacagctaaggtttgctttgcagtttgaggaagcagcccaagaaaggtaaggaaaggaaaagcagaccaaatcaagaggcagcagaaaatcctgggacagaaggagagggaaagagttgtcaattgctacaacaaaagtaccttagaaaaaaaagagctgggccaggcacagtggctcacgcctgtaatcccagcactttgggaggctgaggcagcaggattacctgaggtcaggacttcgagaccagcctggccaacatggtaaaacaccatctctactaaaaatgcaaaaattagccaggtgtggtgacacgcacctgtaatcccagctactcgggaggctgaggcaggagaatcatttgaacccaggaggcggaggttgcagtgagcagagagcgtgccactgtactccagcctgggtgacagagcaagactccatctcaaaaaaaaagaaaagaaagagttgtcaattgataggaaaggggagaaggggctaaaagaaaataagacatagcagttttgaatctccctgttccttttttttttttttttcaatctccctgttcctaaaaagtacccacagaaagaaaagttatacctgtagccaagtagagcttatgggaaagagtatgtgctctgcgagaatcacttgaacccgggaggcggaggttgcagtgagccgagatcgcgccactgcacttcagcctgggctacagagtgagaccctgtctcaaaagaaaaaaaaagtgtgtggccaggcacggtggctcacgcctgtaattccagcactttcggaggccgaggcgggcggatcacgaggtcaggagatcaagaccatcctggctaacacggtgaaaccccatctctactaaaaatacaaaaaaattagccgggcgtggttgcgggggcgcctgtagtcccagctactcaagagtctgaggcagaagaatggcgtgaacccagggggcggagcttgcagtgagccgagatcgcgccactgcactccagcctgggtgactgagctagactccgtctcaaaaaaaaaaaaaaagtgtgtgttctggagtcagcttgacctggttcaaatcccagctctatcacttactgactatgtgactcttagataagtcctttcacctttctttgcctctgtttgctcatctgtgatatgaggataaagcaacacttacctcaaaaagttcttttaaggattaaatgacagtgcatgtgcaggggcctggcatataacaggtactcagtaaatttttttttaataaaaatgctacaatgttgaggtggtcttattattattattattattattattattattattattttctgagacaggctggagtgcagttggcgcaattgaagctcactgcagcctcgacctcttggactcaagagatctgcctgccacagcctcttaagtagctaggactatgggtgaatggcaccagccaccatgcctggataatttttgtgtttctttttttgtagagatggggtctcactatgttgcctatggctggtcttgaactcctagactcaagcgatactcctacctctgcctccttttaattttttttttaagagacgggggtctccatatgttgcctaagaataacctggccaggggccaggcgcggtggctcacgcctataatcccagcacttagggaggctgaggcaggtggatcacgaggtcaggagatcgagaccatcctggctaacgtggtgaaaccccgtctctactaaaaatacaaaaaaaaattagccaggcgtggtggcgggcgcctgtagtcccagctactcgggaggctgaggcaggagaatggcgtgaacctgggaggcggagcttgcagtgagctgagatcgcgccactgcagtccagcctgggcgacagagcgagactccctctcaaaaaaaaaaaaaaaaaaaaaagaataacctggccaggttattcttttattattattattatttcttttattcttttttttttttaagaggcagagtctcgttctgtcgcccagcctggagtgcagtggtgggatctcagctcactacaacatctgcctcccgggttcaagcgattctcctgcctcagcctcctgagtagctggaactacaggcatgcgccaccacgcccagctaattgttgtatttttagtagagacatggtttcaccacgttggtcaggctggtctcgaactcctgacctcaggtaatccaccagcctctgcctcccaaagtgctgggattacaggcgtgagccactgtgcctggccttttttttttttttttttttttgagacagccggctaatttgagacacctggctaattttttgtatatttagtagagacggggtttcaccatgttagccaggatggtctcgatctcctgacctcgtgatccacctgcctctgcctcccaaagtgctgggattacaggcgtgagccactgtgcccggcctttttttttttttttaaatataatagagacgagggtcatgctatgttgcccatgatggtctcaaactcctgggctcaagcaatccacccacctcagcctcccaaagtgctgggattcgaggcgtgagccactgcgcctggcctaggttttgtttgtttgtttgtttgtttgtttgtttgtttgttcgtcttttccgagacggagtctcactctttcccccaggctggagtgcagtgacgggatctccactcactgcaacctctgcctcctgggttctaacaattctcctgcctcagcctcctgagtagctgggattacgggtgcccgccaccacacccagctaatttttgtatttttagtacagacggggtttcaccatgttggtcaggctggacttgaacccctcagtgatctgcccgcctaagcctcccaaagtgctgggattgcaggcgtgagcccctgcacccagccggttattcttaataattctctggccacctgttctagagtgtaacacatctcaccacctgaagcatttcttttctttctttgtttctttcctttttttttttttttttttttttttgagacagagtctcgctctgtcaccaggctggagtgcagtggcgcaatctcggctcactgcaatctccgcctcctgggttcaagcaattctcctgcctcagcctcccaagtagctgggattacaggtgcatgccactacacccagctaatttttgtaattttagtagagacgaggtttcaccatgttggcctcgatctgctgacctcgtgatccgcccgccttggcctcccaaagtgttgggattacaggcgtgagccaccttgcccagcccctgaagcatttctttatggctaactgtggtgcctagtgcagcagctttgcatatagaatcccaggcttgggagaaagggcacccatagccctgcttccccatgctggttggcacatgacatgaactcactaaggctttttatttatttatttatttatttatttatttatttatttatttagctaaatgaagaaaccttgttctgagaagtaacctatgtcctgtggactgtccttctttccccagattctttcatcccatttcccaacttttgcagttgctgttaccccacccctttcctctacagcatagaggaccacccagggctgaatatgaggcttcttccacaaccagttgctctgctgtggagcatgcactggggtcaggaaatgactccagggatcactgcacctcctatggtccagggctgcatgtcctcctcacattcagtttcctgctgctagtatgatctccttgcaacttaatggcagaagtggcaagaggtgggagaagccttcttagcctgcctaagggatagaggagaatttcctccctagagcaactggcaagctcctgaaaccacgaggttgcaatatgcacttggggttgggggctgggcagcaatggggtctcagacagaccctataggtcaacaacagcattggggactgctcaaggtggctcacacctgtaaacccaacactttgggaggcaaaagtgggaagatcgcttgagcccaggagttcaagaccagcctgggcaacatagcaagccccccatctctacaaaaaaaaaaaattgaaaaattagctgggcatggtgacacatacctgtggtcccagctaattgagaggctgaggtgggaggatcgctggagcccaggaggtcaaggctgcagtgagcagtgattgtgccactgcactctagccttagtgatatagccagaccttgtccccaccctctaataaaaaacaacccacagcattagggagaaaaaggagagatcttgggtttgacagaccatttattcccccaaagcaactttgttatcttttcctgagaagatttttttttttttttgagacggagtcttgctctgtcgcccggactggagtgcagtggtgcaatcttggcccactgcaacctctgcctcctgggttccagtgattctcccacccagcagctgggattacaggcatgcgccaccacacacggctaattttttgtatttttagtagagatggggtttcacattgttagccaggatggtcttgatctcctgacctcaagtgatctgcccacttcagcctcctaaagtgctgggattacaggcgtgagcaacggcgcccagcctttttttttttttttttttaatggttagcctttgctttctacagacactatctgcagaagcacagggagcctgctgtagaaagacttctgtctcagatacattgtttcatcctacctatcctaccgctttggaacggtgtgaccttgaggagttacttatctgagcttcagcttcttcatctggaaaatgggataacaggcttcctaaatgggtcgaaagaaaaaatgtatggaacaacgctcagcacagtttgtggcttcataaatgagctctctttcctgtcctctttcctctccatattccggagaggatctaagcctcagggaaaatcctggtgaccttaagcttctgacggggccatgggggagggcctcagcccagagcctctgggtcccctggggtcccctcttcacatccacctgcctgtgttttatctccctccccccgcccccccgtggccattcttctggtggggctatggggcgggtgcggcgatggaccgggcgggcacagaacaggtgggtgcaggctgggtgtccggcgctgggacacaagtgctctgtgtgtagggtgggcggaagtcagggcgtttgatctgaattctaaagggcgttgttcagagccccacaaaggtctcattgtgcagacactgggtataaagcagcatatgactccccagcaccgggcggtgatgaattgggacgcaggcgcggagcccagggaccactccccctgcacagacatgagaccataggggacctgtctgggtggcctcagggataggcgctccccaaggtaagagggctttgttgagtttgccccaggtctggagttaaggagctaggggacagggagccataggggatggctgatatcggaacaagatgggcttggcaaagaaaggggctggcgggaaaagaatgttggatgaaagcgaagaagggggatggggctcagggaggtcaagtcaagtgagtgaggaggaggagaagctggcaagggagatggggtgacgaggaaagacatgaccatccttcctttcctgctactggctcttggaagagttgagggggggtgcgcaggcagtgctatggcgcccgactttccaccccagctttctgacagcttgcttcatggctggtgttttgcaggtgtgaatgaggcaggatgaactggacaggtttgtacaccttgctcagtggcgtgaaccggcattctactgccattggccgagtatggctctcggtcatcttcatcttcagaatcatggtgctggtggtggctgcagagagtgtgtggggtgatgagaaatcttccttcatctgcaacacactccagcctggctgcaacagcgtttgctatgaccaattcttccccatctcccatgtgcggctgtggtccctgcagctcatcctagtttccaccccagctctcctcgtggccatgcacgtggctcaccagcaacacatagagaagaaaatgctacggcttgagggccatggggaccccctacacctggaggaggtgaagaggcacaaggtccacatctcagggacactgtggtggacctatgtcatcagcgtggtgttccggctgttgtttgaggccgtcttcatgtatgtcttttatctgctctaccctggctatgccatggtgcggctggtcaagtgcgacgtctacccctgccccaacacagtggactgcttcgtgtcccgccccaccgagaaaaccgtcttcaccgtcttcatgctagctgcctctggcatctgcatcatcctcaatgtggccgaggtggtgtacctcatcatccgggcctgtgcccgccgagcccagcgccgctccaatccaccttcccgcaagggctcgggcttcggccaccgcctctcacctgaatacaagcagaatgagatcaacaagctgctgagtgagcaggatggctccctgaaagacatactgcgccgcagccctggcaccggggctgggctggctgaaaagagcgaccgctgctcggcctgctgatgccacataccaggcaacctcccatcccacccccgaccctgccctgggcgagcccctccttctcccctgccggtgcacaggcctctgcctgctggggattactcgatcaaaaccttccttccctggctacttcccttcctcccggggccttccttttgaggagctggaggggtggggagctagaggccacctatgccagtgctcaaggttactgggagtgtgggctgcccttgttgcctgcacccttccctcttccctctccctctctctgggaccactgggtacaagagatgggatgctccgacagcgtctccaattatgaaactaatcttaaccctgtgctgtcagataccctgtttctggagtcacatcagtgaggagggatgtgggtaagaggagcagagggcaggggtgctgtggacatgtgggtggagaagggagggtggccagcactagtaaaggaggaatagtgcttgctggccacaaggaaaaggaggaggtgtctggggtgagggagttagggagagagaagcaggcagataagttggagcaggggttggtcaaggccacctctgcctctagtccccaaggcctctctctgcctgaaatgttacacattaaacaggattttacagtaaatgaagaggtggcttgtgtgtttgtcaagttctttctcctgcaacctctgacctcccccaggatgagctggccttggttttttactgattaagaaaggaacagggcaaaagaagtagttacttgagtagctgaagctgcaaatgaggaaatcactgtacttctgggccgcagagccagccccggagccattcctccctgttgcttttgttgttgtggttcttgtctttttcattgtctaataacagctttattgggatttagtttacatacctccttcctctgattttgaaaagattaaaaatgacaactccctctgaa

SEQ ID NO: 30 - DNA, 5469 bp, Homo sapiens
gttgcggccccgcagcgcccgcgcgctcctctccccgactcggagcccctcggcggcgcccggcccaggacccgcctaggagcgcaggagccccagcgcagagaccccaacgccgagacccccgccccggccccgccgcgcttcctcccgacgcaggtgagcccgccggccccggactgcccggccaggaacctggcgcggggagggaccgcgagacccagagcggttgcccggccgcgtgggtctcggggaaccggggggctggaccaacacacgtccttgggccggggggcgggggccgccttctggagcgggcgtttctgcggccgagctccggagctggaatggggcggccggggaagtggacgcgatggcaccgcccggggtgcgagtggggccgggcgcgcgcgggaggggaaaaaggcgcgggcgagccgccagcgcgaggtttgtggtgtcgccgatgtcccttcggggtactctagcgcagccgcctggctacttgacccactgccaccaaacgttttaaattcaccgaaagcttagcttcgaagcaaagctccgtttcgccggtgaagcaggaagccttcgctgcaggaactgacctttacctcttggagcggcttctgcagaaaaatccccgggcagagatttgggcggagtttgcctagaactaacgcggagccagccgatcccggcctaccccggggccaagatttcagtggcttccctttttcctaaacacttcacgagggtctgtttccgggctgtgctccccgcctagaaggaaaatttttaggacccttgttcgcgaagaggtggtgtgcggctgagacccgcgtcctcaggacggttccatcagtgcctcgatcctgccccactggaggaggaaggcagcccgaacagcgctcacctaactaacagctgctgagagctgggttccgtggccatgcacctgggactgccttgagaagcgtggtacggccgtgtccccatgtgaccttagagtccctttcgaaactgctgtgcacagtcggtcacaatttcagacactggtgagaagggtggaggaaccctctggggacagccaggcaaggtcgaccacccatcacctaagggtggagaaatttaaggggtgaagagtcccttttgccttttctggatcctggtgattcacctagtgtcttccctaaggaactgaaccaactcctccgctggcctctggcagccctccaggcggtgcaggatggcgtgggcccggtaggaagctgcatgtaaccgcccagggtcgggaggccaggagggcagctcctcctctgacttgaatattgaaaacaacttcgtcctgcttctgagcccctcttaacccatgaccccctagcccattggggagtaaatcttaatttactcctcttcctgaaaaaggatctttaaaacaggtagcttcaactcaagctttataaaataacaatatagggtttctcggaactgtatttttctcagctgatggtaactggacaggtctgtagaagggtgtatgacctgggtttggcaggtggaagagggcaaaggataaacccctcctcctgcagccccatattcttggccaggtgtattgttgtaaaccaggagagagtttacttcggggagtatcctgttttccactcagtgagggccaatgaagaatgtctaattccataagatgcttttgttaaaatcggaatgttgctgtcctcggtggttctgctgttgggacgggactggcctgagctgtgggtgctgtagcaggacaaccagctcacctaagggcctcccagtctggattatcaatgggtcagtgctgaacctgggctaaaatattgttttttccaatgatgttgtctttcccaagctcagtgaagctaaatgtttcacaggcctatgtcaatctgatgtaactttcgtggccacctctctcctgttagcctctgaccaaggtggcactggatggtttctgcctgaccttggtgccccgtggcagcgactgtgggtcatgaaagacattcactacgagcctgcttctggagtccatcagaaaacgggatgcaacttgcctaaaatgaggagaggaggatgcttttaagaaaaagaagaaggaggattcactaccagctctgaagggtggaaaagagatgattcatccggattgtggagagggtggaatcttgtttaggagagcgttggttgtggcaggcagggtgtaactatgaatcagtgaagacaattcacatcctgggatgaaaagaaggccatgggctcacaggagattatccactggcctctccacatccgcttgcagtaaggagtgtgggactctcccaagcttcagcgctgaactgcaatgcagtgacgtcgcttagctgggccagtaaccgagggagttgaattttctgtcattttaaaataatgtgtcttttaagaaacactttgaaattaaaaccacagcccacaattataatgcactgttgcagcacttatcaaaacagatatgctaactgagccatcagtgccagcctgacagtgaggccaccaagccatccacaaagcctacacgaaagtctgtgctcacagtggcttttctccatgaagagggcattcctaacctcttcctttcacgtaggaggaagcaaggtcctttgtaaaattttaactcggggtgcctcaaatgtaaacttaaccactggtaacaacagtttcactgctacatgccacgtctgtgaaaattcattcaagacattaaggaaagtggctcagcagagagactagacatcttatcctcacggttctcctgtacttggcctctcagcctttgagcaaggttggcccaagctagtatcggccccagtggtacagccaaaacttgagactgcaaatggatgcagctgttgaacgctgagtaacttctgcagagtcaggaagacccaaggaagctctgcagaggatgcaggggtacggtcagaacccctgagtgcctttcagctaacgaggactttatgacactccccagcacagcaaatttttatgatgtgtttaaagattgggtgaattactcaggtgaacaagctactttttatcagagaacacctaaaaacacgttcaagagggtttgggaactatacatttaatcctatgacaaactaagttggttctgtcttcacctgttttggtgaggttgtgtaagagttggtgtttgctcaggaagagatttaagcatgcttgcttacccagactcagagaagtctccctgttctgtcctagctagtgattcctgtgttgtgtgcattcgtcttttccagagcaaaccgcccagagtagaagatggattggggcacgctgcagacgatcctggggggtgtgaacaaacactccaccagcattggaaagatctggctcaccgtcctcttcatttttcgcattatgatcctcgttgtggctgcaaaggaggtgtggggagatgagcaggccgactttgtctgcaacaccctgcagccaggctgcaagaacgtgtgctacgatcactacttccccatctcccacatccggctatgggccctgcagctgatcttcgtgtccacgccagcgctcctagtggccatgcacgtggcctaccggagacatgagaagaagaggaagttcatcaagggggagataaagagtgaatttaaggacatcgaggagatcaaaacccagaaggtccgcatcgaaggctccctgtggtggacctacacaagcagcatcttcttccgggtcatcttcgaagccgccttcatgtacgtcttctatgtcatgtacgacggcttctccatgcagcggctggtgaagtgcaacgcctggccttgtcccaacactgtggactgctttgtgtcccggcccacggagaagactgtcttcacagtgttcatgattgcagtgtctggaatttgcatcctgctgaatgtcactgaattgtgttatttgctaattagatattgttctgggaagtcaaaaaagccagtttaacgcattgcccagttgttagattaagaaatagacagcatgagagggatgaggcaacccgtgctcagctgtcaaggctcagtcgctagcatttcccaacacaaagattctgaccttaaatgcaaccatttgaaacccctgtaggcctcaggtgaaactccagatgccacaatggagctctgctcccctaaagcctcaaaacaaaggcctaattctatgcctgtcttaattttctttcacttaagttagttccactgagaccccaggctgttaggggttattggtgtaaggtactttcatattttaaacagaggatatcggcatttgtttctttctctgaggacaagagaaaaaagccaggttccacagaggacacagagaaggtttgggtgtcctcctggggttctttttgccaactttccccacgttaaaggtgaacattggttctttcatttgctttggaagttttaatctctaacagtggacaaagttaccagtgccttaaactctgttacactttttggaagtgaaaactttgtagtatgataggttattttgatgtaaagatgttctggataccattatatgttccccctgtttcagaggctcagattgtaatatgtaaatggtatgtcattcgctactatgatttaatttgaaatatggtcttttggttatgaatactttgcagcacagctgagaggctgtctgttgtattcattgtggtcatagcacctaacaacattgtagcctcaatcgagtgagacagactagaagttcctagtgatggcttatgatagcaaatggcctcatgtcaaatatttagatgtaattttgtgtaagaaatacagactggatgtaccaccaactactacctgtaatgacaggcctgtccaacacatctcccttttccatgactgtggtagccagcatcggaaagaacgctgatttaaagaggtcgcttgggaattttattgacacagtaccatttaatggggaggacaaaatggggcaggggagggagaagtttctgtcgttaaaaacagatttggaaagactggactctaaagtctgttgattaaagatgagctttgtctacttcaaaagtttgtttgcttaccccttcagcctccaattttttaagtgaaaatatagctaataacatgtgaaaagaatagaagctaaggtttagataaatattgagcagatctataggaagattgaacctgaatattgccattatgcttgacatggtttccaaaaaatggtactccacatatttcagtgagggtaagtattttcctgttgtcaagaatagcattgtaaaagcattttgtaataataaagaatagctttaatgatatgcttgtaactaaaataattttgtaatgtatcaaatacatttaaaacattaaaatataatctctataataa

SEQ ID NO: 31 - DNA, 5151 bp, Homo sapiens
actgtgccccttcccgctgtgggtacaaggtctgccccccaccccagctctccaaagcccaccggcctccctggaggccgaggtcgacggcccgtcgcaccgggagggggggctcccaggggtgccccacgcacggtcaaggtcccgcgccaagcggggaccgggctgggccggaagcgggcacggtactcgcggcaaactagcgtgggcgagtcctgattgcagtcggacctgccgccgcggcacttaacagtttgcagagtgcttcccgcccctgatctcattggagccttcggacagcccagcccatggccaccgatgcccccatttcacgcctgaggaagcggaggctcagacgggccaccagcccctccggaggctggcccgggagcgcctggcagcgtcgggtctaggagccggctccctcctgctccctcctccgcgccgcccggggtgtgcccgccgtctgtgtgcaccactgctgagcccagctccggcgccctcgcctctgctgtgggccccggggacgcggggtcaggccaccgcgttggccaggccgctgcaggtaagtgctggacggggcggggcgaggctgggcgggaccctcaggggcgccaagcgctcctggcgaccccctgcggcagggctggggcttgagcctgccagtgcgctgggatggggcgcgaagcgggggtgcggggagcccgccaccccgtacctctcaatcctccctctcgcctctcaattctgggcccattaggggtcccggctgcgggaaggttccgagacaccccctccccaagtccgcaagctcccaagctgcctaggatggagggaaactgggaaggaaagggagctttatccttcagggacattgtggggcgggaggtagggctgggcacagtacagtctgggggtcagggaaaaaacggttgcgctgggagctggctttggagggcagctgggggaaccagaaccggctccaccagtccccagcctagacttgggaaggaaattctttgccagtgaagctcctccctggggtgtgtcaggagggactgggcagacagcacccaagggtagaagatgggggcccaggagggagctgcaccctggtgggcagccatgggagtgtgtcaggtggaagcagccgtcagggtccctctctgctctctgtccggacagacagggctccaaccttcacttcagttcttgtgaactcccaccaggtgagtagcagcctgggagggaagagtctcaggattctaccagaaagtaggaattatttccctttagagattagtaaatagggtcaatgagattagggaattcttggaagtcgcccagctactaagtggccaagctgaggtttgaatccaggtggaactccgtgttccatgctatcccactcccttcccccaccacgagggcttagaaggagcagagtaggggagaagaggagggtttccaagaatgaggtcttcccaatcaccccatcctgcccagactgtgattcccagaggaaacgcagccaggagagccaggtgctgagaaggaactgtgctctctccctctctccagtgtagggaagtctttcccccaatccccctgaccaggctgccccctgaccaggatcctgcccaccctcctgtcccctccctccaagctgccttgctgaaaactcagcattcatttgtttacccattcagcgctgagtgcctactatgtgccaagcactgggcactaaatataaagcagtgagcaagaccaagttgacattctagagggggagccagataattaataagaccaaaaaaaaaggacaaattctttaatttcagatagtgactaagtgctataaagaaaacagagggggctggaaaaattaggtgggcatagtggtgtgcacctgtggtcccagctacgtgggaggctgaggtaggaggctcccttgagcctgggaagcagaggttgcagtgagccaaggtcgcaccactgcactccagcctgggcgacacagcaaggccttggctcaaaaaaaaaaaagaaaggggacaggaacagagtgacagaagcaggggctctttcagacccagggtaatctggagaggcctctaaagagatgaggtttgagcagaggcctctgtgatgagaaggatccacccatgtgaggttctggaggaagagcattccaggcagaaggaatcagtaaaaagcccccaaggcccttattccagggtggcagggtgaaaatgtcgaatctggggttttgctaagcctagcgagaagctagtagagtcttaaacaagggagtggcatgaactgatttaatggactctaggggcacagggggaaggtgaaaagccagtaaagaggccataatacaggccagaataatagtggtttggggcagggtggtggcctcgcaggcatcacgcatgctcagaggtgcaagtcagctccagggggactcacatgcacataggcccacacacacacgtggacaggcaggcgggtgctctcacacccacagcagcacagaaacaaggcacactcaggcagacccacccgtccacaccctctgagtcactccaggactgggaggaagatgtgtgagttaaggcctgaacaaagcacatctttccaccacaaggccctggcaactagtgtggctgggggtggctgggcttccccaggcccagcacagggagcagggagttttctctagatattccctggatctagtgtcctcccaggagtcagatcataaggctccatgcaccccccacctgaactggtctcccctcttcaccacccagcagctgtgagaccttgagctggttatttctcctctctgagcctcagtttccctgctgtagaatgggactcataactgcaacttcacagtatagtagtgaggcatccacaaagtaaacgtttcaagaatctggtctagggcaggagtccagcggagaagggaagaggaggtggtggagagcacaggctctggtacccaacagcctggccttgaatccacctcttgttttaagtgagtgacttgacctctctaaatttcacagtaatgagtagccagcatttatggggcacttactatgtactacttgctttgcaatcgttcaatgatcagtttcatctgtaagtgaggagcactgtaataactaccttatggggtcattctaagagattaaatgaggttctgctcataaagtgtttaacttcatgcctgactctgagtaaacactcaataaatggtgattgttattatcagccaaagcatatttgcttccttccagcatactagctctgttgcctttggttaagttatataaccttgctgtgcctcagtttcctatctgcagcttgggaggaataacagttctgaactcagagggtcgttgtgagtattgaacaagtcagaactcagaacactgcctggtacatagtaaatgctcaataaagtcacctattcattcatacgatggtttttcctctaattctctcaggtaggcacggcccccaccaggcgccatggactggaagacactccaggccctactgagcggtgtgaacaagtactccacagcgttcgggcgcatctggctgtccgtggtgttcgtcttccgggtgctggtatacgtggtggctgcagagcgcgtgtggggggatgagcagaaggactttgactgcaacaccaagcagcccggctgcaccaacgtctgctacgacaactacttccccatctccaacatccgcctctgggccctgcagctcatcttcgtcacatgcccctcgctgctggtcatcctgcacgtggcctaccgtgaggagcgggagcgccggcaccgccagaaacacggggaccagtgcgccaagctgtacgacaacgcaggcaagaagcacggaggcctgtggtggacctacctgttcagcctcatcttcaagctcatcattgagttcctcttcctctacctgctgcacactctctggcatggcttcaatatgccgcgcctggtgcagtgtgccaacgtggccccctgccccaacatcgtggactgctacattgcccgacctaccgagaagaaaatcttcacctacttcatggtgggcgcctccgccgtctgcatcgtactcaccatctgtgagctctgctacctcatctgccacagggtcctgcgaggcctgcacaaggacaagcctcgagggggttgcagcccctcgtcctccgccagccgagcttccacctgccgctgccaccacaagctggtggaggctggggaggtggatccagacccaggcaataacaagctgcaggcttcagcacccaacctgacccccatctgaccacagggcaggggtggggcaacatgcgggctgccaatgggacatgcagggcggtgtggcaggtggagaggtcctacaggggctgagtgaccccactctgagttcactaagttatgcaactttcgttttggcagatattttttgacactgggaactgggctgtctagccgggtataggtaacccacaggcccagtgccagccctcaaaggacatagactttgaaacaagcgaattaactatctacgctgcctgcaaggggccacttagggcactgctagcagggcttcaaccaggaagggatcaacccaggaagggatgatcaggagaggcttccctgaggacataatgtgtaagagaggtgagaagtgctcccaagcagacacaacagcagcacagaggtctggaggccacacaaaaagtgatgctcgccctgggctagcctcagcagacctaaggcatctctactccctccagaggagccgcccagattcctgcagtggagaggaggtcttccagcagcagcaggtctggagggctgagaatgaacctgactagaggttctggagatacccagaggtcccccaggtcatcacttggctcagtggaagccctctttccccaaatcctactccctcagcctcaggcagtggtgctcccatcttcctccccacaactgtgctcaggctggtgccagcctttcagaccctgctcccagggacttgggtggatgcgctgatagaacatcctcaagacagtttccttgaaatcaataaatactgtgttttata

SEQ ID NO: 32 - DNA, 2588 bp, Homo sapiens
caaacagacaagcccaaggacaaggaagcagctactggacccaagaagggtgaggaccgaatagggcaggaggctggccaggaagcaagcaaccagctgagctgaggatatccaagggacctcaggctgtgggctgggcttcagggagggagccagagggtcagtgtccctagaggatccccagggaagtgccaaggaggagaaggaatgtcctggctgacctaagggacgacagaagattggggaagagggggtatcaggaagaaatgggtttcagttcagtttaacaaacatctattgtgtgttcactgggccaggccagtgctaggtgctagggagacagaggtgaagagcctgccctctagcagctgacagcctggcaaaaaaataagacaggtaaatagaccatttgggtacaggcgatgcctcttgctctgaaagtgtcccaggcacacgatgtctgaagaggctgagagcagagtcagggattggggatggggaaggaggagggtaggaggaggggagggttggacatggggcctgatggggactccagacaagggggtgtggaggtcagagtccacaggagaggggcctgagaggaaataatggaaatgcggctagcaaacagccactaaatggacagaggagggggtgcccccagagaaagtaaatggggggtccagaccatgccagaatccatcctcagtccttcctaaagctggaatggttggaattccagaggaacccactgtggtcaagacagtcagccctcaggccccagcaccagtacacgggttggcagggatgatatcaagtccccgtgattccaaagcacctctgtttagtttgggagggaatgccagggctgagaaccttcctggagccagaggcaaggagtaaggatgcagattgttctgggatttaccaaggggctgatgtgaacgtccccaacacggggccaggctcttgttggtgttcagtaaaagtgggatggatctgacaactgataaggatacgttcccacccctcctgccctggcccagccctggcagctgatgggagagcagatcgtccaattcaagccttcctacggtctctttagaagacatgggctgaaacttggggtaatagaggttggctggcatatccatgcaggatgattgtcttcacatgtatctattaccttgtagaataaggtagaccctgattttggaacctgaagaccaaagtgcaagattagctctgctacttccatctgtggaccattgggcaggtatctctgggccttcacttactctttgtgaaatgaggacaggggcaatccctaccctaccaagtcattgggagtgaagacatgatgacacggtgattgtgaaaagattttgtcaatcgcaccagcattaagggtgcccatctccaggttcccccaggcctcaaggctcccaaggcctgagtgggcaggtagcacccaggtatagaccttccacgtgcagcacccaggacacagccagcatgaactgggcatttctgcagggcctgctgagtggcgtgaacaagtactccacagtgctgagccgcatctggctgtctgtggtgttcatctttcgtgtgctggtgtacgtggtggcagcggaggaggtgtgggacgatgagcagaaggactttgtctgcaacaccaagcagcccggctgccccaacgtctgctatgacgagttcttccccgtgtcccacgtgcgcctctgggccctacagctcatcctggtcacgtgcccctcactgctcgtggtcatgcacgtggcctaccgcgaggaacgcgagcgcaagcaccacctgaaacacgggcccaatgccccgtccctgtacgacaacctgagcaagaagcggggcggactgtggtggacgtacttgctgagcctcatcttcaaggccgccgtggatgctggcttcctctatatcttccaccgcctctacaaggattatgacatgccccgcgtggtggcctgctccgtggagccttgcccccacactgtggactgttacatctcccggcccacggagaagaaggtcttcacctacttcatggtgaccacagctgccatctgcatcctgctcaacctcagtgaagtcttctacctggtgggcaagaggtgcatggagatcttcggccccaggcaccggcggcctcggtgccgggaatgcctacccgatacgtgcccaccatatgtcctctcccagggagggcaccctgaggatgggaactctgtcctaatgaaggctgggtcggccccagtggatgcaggtgggtatccataacctgcgagatcagcagataagatcaacaggtcccccccacatgaggccacccaggaaaaaaggcaggggcagtggcatccttgccgtagcagggtggtgaggagggtggctgtgggggctcaggaagctcgcccaggggccaatgtgggaggttgggggtagtttggtccctgggtcctgagcctcaggggagggaggttgatagctactggggattttgtatatggcaacagtatatgtcaaacctcttaataaatatgattttcccagta

SEQ ID NO: 33 - DNA, 3466 bp, Homo sapiens
agcacacccggcaggctctgtcctggaaacaggcttcaacgggcttccccgaaaaccttccccgcttctggatatgaaattcaagctgcttgctgagtcctattgccggctgctgggagccaggagagccctgaggagtagtcactcaggtaagggcatctgtgtccgcatgtgccctgccccttggcatacgtggcaggaggacacttctctgctggggagtggtgggatgtggcctggacacatctgccaccctgggtcctgatggtggaggaataaggggctctgggttctttcaggtctccccagccgggcaaaggtaggagcaggggccaggccggaagctcagcaggcagggtagctctgcctgggcctgcaaagccctgccccactcctccccaagtagggatgggctgggtgagagcccctggggctaagggcggggccttcctgggtgttccctgagaagctgcaggagtcctaccttagacaggactgagcatgcaagatggtgattcaaaacagagctccccccaaccccggcccccacctccacccatcccccgtccaagtggcgcaggtggtgtggagacagggtggtgggcaaaggttcccccagccaccctcatccaggatccacacacaaggggaaggacagaatccgtctgcacacaaacaggcaggcagctcattgaaacttgaggaaagggtctgaggcctaaggctgggcagttcccggagggtgggctctagagccagcctgcctgggttcaaatcctagctctgccacttattagctgtgtgacgttgagcaagttaattaatccctctgtgttcctctttcctcatctgtaaattgggaataaaaaatatgccctttcctaaggttgctgtgaaggaataatgtactgattcatacaaagaacttagagcggtgcctggcacggcatgaatgcttcatggatattggctgttatcactactctgctttgcagttgatcatgcagaggctccagagagcctggtgagcttcagcctggaccagcatgggaaggccatcatgagccctttagtggctaggcagacaggttccttggggtcccagggtgcacagttggttgaaaccacagtgcatgggtcttaatggacacacccccatctccaggaatcaggcagaggactcgcgggtgaggaagtggggaccccttactctgcctagcagtcacagtccttacgcggaggtgaatctgattctgtgagttcatcaggccaaattcaccagcagaactgacaggagcagcatttcccacttgatgtcttgacaaggctgttccacaagatgataaatgttatgtcaggaggaaaagggcttctgtgggcaaatgagtttgggcaatgccacatatttcatacctcttttggtgaatttattagtgagtttattagcacggttgagcaaaagaaccctatttaactttactaaacccaatgtttgccaacttttcttgacacagaatcctcttctctcacttctcctattgccaacctatgggacagggttccagggaacactgtttgggaaacactggaataccaggttactctaggaaacctactgtatgaagagaatttattgctgcctgctttagctttcagctggattgcattgagtggcacttgagcaggactctgcctggctaattacagagtgttagaccagatgggggcttggggacaaggttccagcctcctttccagtcccatccctgagccaagaaaaggacaaagagcaggttcccctggggaaggggctgtctgagaagaggcagcagtgctcagaaaggagagaaccatctcaaggctcagcccccctgaggaggagggccagggttgaaacagagggagcaggcagaatgtcccagctccaccagtcttcactctgcagaacctcaagaccagagcctcaggcccggggaggaatgagtggctccctggacctgcccttatccactggtattggtaagagctgggttctggacttaattacctatgctcaaatcccagccctgcacctaatagttgtgtaaccttgtatataatgccactaaacctcagctccctccctctacaaaatggggacagtagtagaacccagctcctctagtgatggtaaggatgaaatgtgatgacatatttctacaaagtgctcagagcaagtctgtgataaatgtaggaaatgattgttcttgtttccctgcagtagcagctgacgcgtgggtccaccatgaactggagtatctttgagggactcctgagtggggtcaacaagtactccacagcctttgggcgcatctggctgtctctggtcttcatcttccgcgtgctggtgtacctggtgacggccgagcgtgtgtggagtgatgaccacaaggacttcgactgcaatactcgccagcccggctgctccaacgtctgctttgatgagttcttccctgtgtcccatgtgcgcctctgggccctgcagcttatcctggtgacatgcccctcactgctcgtggtcatgcacgtggcctaccgggaggttcaggagaagaggcaccgagaagcccatggggagaacagtgggcgcctctacctgaaccccggcaagaagcggggtgggctctggtggacatatgtctgcagcctagtgttcaaggcgagcgtggacatcgcctttctctatgtgttccactcattctaccccaaatatatcctccctcctgtggtcaagtgccacgcagatccatgtcccaatatagtggactgcttcatctccaagccctcagagaagaacattttcaccctcttcatggtggccacagctgccatctgcatcctgctcaacctcgtggagctcatctacctggtgagcaagagatgccacgagtgcctggcagcaaggaaagctcaagccatgtgcacaggtcatcacccccacggtaccacctcttcctgcaaacaagacgacctcctttcgggtgacctcatctttctgggctcagacagtcatcctcctctcttaccagaccgcccccgagaccatgtgaagaaaaccatcttgtgaggggctgcctggactggtctggcaggttgggcctggatggggaggctctagcatctctcataggtgcaacctgagagtgggggagctaagccatgaggtaggggcaggcaagagagaggattcagacgctctgggagccagttcctagtcctcaactccagccacctgccccagctcgacggcactgggccagttccccctctgctctgcagctcggtttccttttctagaatggaaatagtgagggccaatgcccagggttggagggaggagggcgttcatagaagaacacacatgcgggcaccttcatcgtgtgtggcccactgtcagaacttaataaaagtcaactcatttgctggt

SEQ ID NO: 34 - DNA, 10358 bp, Homo sapiens
gccttcacccgaaacccgacgagagcccgacagccggcggcgcccgagcccgacctgcctgcccagccggagcgaagggcgccgccccgcgcagagcccgcgccagggccgccggccgcagagcaggtaagcgggcgcggaccggctgggtcttgcggggggcgagcgggcggtgccacctcggccccccagcggaggaatttcctccaagaaaacaaaacaggtgaggtcggcggctggtccccacctcgcccctgtcgctcctgtctggcaccggatcagagccggcagagcgcggccgggatgggtgtctggccgcacgtggggcgaccgggcccccgatctgcctctatccgcaccctcctgtccacgcgccccggccccggcccgatggcagtgggcgccgcccgcgctggaccctctctctgtacgcagaggaacgaggatggactggtttgacttttaccccagcgtggtcccctttgacttgtacaacaggttttatgaaggtttcatatcgtgtgtctaagaggccagagtgagggccggtgcccctttcccccgtttcatttgctgcgtgttggattttctaagcttttgtgggtcaccggggtgtccccttggatttggggagaagaaagccaggtctaggatgcgggtttcagttcagacaaaccctcaacttgggccgatgcataagtccccggagaaccgcagggtatgggctgcgtgatgggcttccgagaaacttgtgaaatgctgatgacaatagcgtggacgacagtaattaaaagtaattggcgacacatcttagttaaaacgtgcaggcaccagaaggcacttcctgtcggtgaagaagacctgtctccggtgtcacgggcatcctgtgttttgcaaacggggctgacctcccttcctggggagcaggaagggtcagggtgagtgtggcctgcccgcagctctgcactcccggaggggttagggacctgcaaccaggcggggacactggcccagcgacctcagtgtcccctgggtgggcgtgcactctgtttagtgtctgattgaacgtaaccgtgccgggttgttcttttccctcaagtagactttatgccatacagctattttcttgccccagttctagcagaatctaaccagtgttctagaagaaaatgtcctgcccccatgcagtctccttagaattgcagggtgctgctcagaactgctcctgtggagagctttgtctgttgtttggatccagcagcgtctttgggggtgttgcttgaagcttgccaaggaggagaggggggttctgaagagagaacaccagggctctagcctgtcacataactgggggtgtggagagcgcctcattgccactgcagtgactaaagctgggaagacgctggtcagttcacctgccccactggttgttttttaaacaaattctgatacaggtaatgatgactttatgctttttttcttatgtcttctcttctgaattctgagtgttaggaaggaaaagaagtacagaagatctggctaaacaatttctgtatggcgaaagaaaaattctaacttgtacgccctcttcatgcatctttaattcaatttgaatattccaggtgctgtgagcagtttgcatatattagtttaaatgttaaatgggataaaattgtgggaaagtgatttctgacccaagcttcttggtctgtgagggcataaccttctaatggccacctgccataggttatgatttctgttttagttgcttagtgcatgagcatagacctggaaccccagagggcctgctccatttttattcccagggtcatttaaatctagttgagcttaaatgtttggaaaggacacaggtttgcttgaatgaacaaacatatattgctaacaagacccagagaaggaaagtttaacttaatggaaattaatttttaactctttgaattcttaaatgatgtaagaaacatacgtaattgcatgagttttccatttttacatctagactccacagacagaaacgtttcatttttattgagttaattttgaaatatatgaatccctgacccattgttatcactagctgttactctatcaggacagttgctgaagttttttgtcactaaatttaaaaatcaactatcaggttgtcccttggatgacctgagatttctagagacaaaagaaatctattcttcctgattgaagaaagagtctgagattttttttaaaccactgatttggggatcagggtgtagccagtgtctcaaactctcccctgtccctttttgttttgctcaaggagtgggcttgaggcctcagattgggtgttactgttattttgatagggaaaggatcctactaaagagcacctttgattattttgtgtgttcaaagcatagagcatcaggaagctggcaatttctgaacttacctcataacagttctgggaatgaagaaaaactacccacaaagtttattcaggggacatattgcggggggcggggggggggggagttaaaggaatatggcaacagctactatttttccctcaacaggcgacatcctcactgaccgagcaaagattgacattcgtatcatcactgtgcaccattggcttctaggcactccagtggggtaggagaaggaggtctgaaaccctcgcagagggatcttgccctcattctttgggtctgaaacactggcagtcgttggaaacaggactcaggtttgcttgttttgctttgatattgttttccttttatctatgcagactccccgactatccaaagctaacttcgaaattgggaggcacatgttcctgttctcagatctatcaactactccctagatggccaggcgcgatggctcatgcctgtaatcccaacactttgggaggccgaggctgaggtcaggagttcaagaccagcctgaccaaggtggcaaaaccctgtcactactaaaaaaaaaaaaaaaaaaaaaaaaaaaaaaattaaccaggtatggtggcatatgcctgtagtcccagctattcaggaggctgaagcacaagaatcactagaaccggggaggcagatgttgcagtgagctgagattgcaccattgcactccaccctgggcaacagggcaagactctgtctaaaaaaaaaaaaaaaaatttttttttttttttttttttttttttgctaaatgacattgaaaggggaacagagctatctagaaaaatatgctgaggggttacactctaactttgggggctttagttttggttctgtcattagtgaaattataatggcatagataaataagctagttgtgattaatttcctaagaagttttaaaacaatcaagaaatttcattagtgcagtcaaatgccaatagatctaaattatttgaattgtaaaaggaaagaacaacctatcttcacaatgctgtgtggatcctcaaaagtaaagtccatggtttacttatttttagagctagatatttcagactggagctttagtatcaagaatatagcatgggccgggcgcggtggctcatgcttgtaatcccagcactttgggaggccaaggggggcggatcatgaggtcaggagatcgagaccatcctggctaacacggtgaaaccccgtctctactaaaaatacaaaaaattagccgggcttggtggcaggcgcctgtagtcccagctgctcagagaggctgaggcgggagaacggcgtgaacccgggaggcggagcttgcagtgagccgagatcgtgccacggtactccagcttgggcaacagagctagactccatctcaaaaaaaacaaaaaacaaaaacaaaaaacaaaaacaaacaaacaagaaaaaacagcatcgagttcttcactatgattacatttactacaaaaccgaacacagtttacctttttaagtttaaatgtaatcacattcttagaagttgaagactgcagaagctaagcgtatctattctttccttaaaagacagccagagaggcatcagttaaaatgaacctctctggtttccgaagaaagagttaatatttcactttgtattgaaaaagctcctcccattggctccagccctccagaagcaggagaggaaagaggtactttgtttactacagttgcaaagggtcccagtggatgcgatgattttggaaagtaatttgaaattagtgacgacttcacaaattgaaatagccttcaaatcttctccaaccaagagggtttgtgaaagattatgccctgtggttatgtgtttttacaagggagaacctgggggctgggcgctttctttgccacccccaacccacaacatccttcctctgggcccctctgcagtctgtccacccaccctgtccacccaccaaagtcaggacaggagcagtcagtggagttgagtcctccttaaaacttgctgagtctcctgcgtttactgccatcctcccaccgctccttgaatgggagcgtctcctggggcagccaggcctggccagtaatggcagcaatgtgctggaaatttgggggcttgataacccgcagctgacccatcaccctggcctatctcttgacacttgcgaggggagctctcttctccctggctgttggcctgcagagaatgatacgcacggcagatccccggagctggttggtgagcccctcaggtgtgacacaacctggaaaagaatggaaagagccactgtctcactgtctcagttgggaaacaccagctcagggtcactgagcacccaggggcagcccactcaggaccgggcaggttcggagagaggacacagcttctcccttggatcacttctgctgttaggaataacagggcctttgtggctcttgcaggaggacactctgaaccaggagactgtcctgagtgaccggggagttagacacacttgtattggatttaacctcatttttctcagcaagctcggcatctcctttacttttcttcctttaaaggcataggtggattgccaatttttagtaccggtatcgagaagcgcgcattgtgaaacagattatattctgttcagttttgctatgttgatagaacaccctcagaccgtgtggcttggggacccagaaaaatccaaagaaatttaaaaagctactgcccttataattgtccctgtttttagaaaaaaaaaacagggagaagcccaaagctgcagaggtcagggaccctgcttctagaaagcgtggaccagtgttcctgggggggagttgtgacctcttgaccttttctgtgactttagcctctcagaatcatccaggccatgtccccctctggctccctgatctgtttacttcctagaaggttggaccacaggggaccacggggtgccgttgttcaggcaggccacgggctagagaaccgagagaacacagctgtctcacctgctggggaggttaaattctatggactttgaagtgttggagaaaatgtgaaccattttttgataaatcaaactcttgctgattgggcattttgttgaccaaatttcaatgggaggtgtttcttggttaataagaaaacatcttcattttataaataaacaggactgaccccataggtgaacagctgctgtaaaatatgtttacacatcaagacgtacaaatttcttgctcctcactggtcacattttgaaatgcttttgagatagaacatcaacagttaggaaaatgtattatgtctttcatctgagaataaaattaattttacaaatcatatcatttaacatgagctttttaaatggagctgcatttactgtggacattggccatctcttttggctgtgaaatatgttgtatatgaaagggaggcattagtacatacactttaattatggaacgctgggaccagggcttccagaggagtcccctgtgcattaccccagcagacactcacacagcctctgatgaaatgcttcaagggatgagaaaacatggtgtgaagggtagcccatttcaattttcttttttttttttttttaagaaaaacctggctttctgttaatgctgagtgtcagatccagttcttagtcctagatccacgcaggcattgaatcctctgtttcacattccagggtcaccgccctgtgcctcagcgtcttcctcaagctagtgtttgttctgttctctcggctgtgaggtaacctccagcctcttccatctgtccacacacctgttgatgcgcccccgagggccaggtctttcctgaaacatggaaagagcccacccttccaatgtgggctgcccggggagcccagcactctgttcccttcacacagcctgagcctcagtctctttttcgcaaccttgtgctgtggcgctgatgtcccgctgataaggatgttcctcctaaggaatactgatattcctgaagtaaaatgctaggctgcagttattgaaggaatcatgaaaatacaacctcccaacgatagcagaggcggcaacaaagaccattgtgattccaagactcggtgccattgccgttgtcatagttgctatcacggaactcttaacaagaagtttagtgacactgttttagaatgttgctgggggctcaacagaaagtcccccagttcacacatatacgttttctcttattttaaaaatcaagatatttgcccttctccaggaattgggcccctcttttcattctgaataataatattctgctctcctgtggaaatgcttaaagaattgaacatagaataaccatgagatccagcaatcccacatctagatacctaagagacttgaaagcagggtcttgaaaaaatagtagtataccctcactcacagtagtgttacaacagccaaaagctggaagcaacccagtgtccattgatagatgaatgggtaaacaaaatggggagcatccatacggtggaatagtattcagcctccaaaataaggaaatcctgtcacacgcagcaacatggatgaacctcgaggacattatgctgagtgaaataagccagttccagaaagacaagtgccgtggatttctacttatatgaggactgtagagcagtcaaaatcatagatgcagaaagtagaatggtggttgctaggggctggggaggggggaatggagaattgttgcttaatattaatacccaaccaagggcaaaaaaaacaatttctcagaaagccaacggaactaggagtcggacttttccaacaggtctgctgactttctaagtctacaaaagatgttgccttggggcacacagtagcaccccactctgaggccaaggcactcctgggtggggagaggctgcctccatttaccccactgcttccaagagcagccagcgtaatgcagaggggcaggtgtgtgggccagagcgtgaggtccagggggctggcctgagaaggggaggctgacaggtgtccctcacccactcagggataagaaagtctaagaccggtgaagagaaggactttggtgactccctcatgccccgacagcctgtaaaaaaaatgcctgagtgaattactctggggagaggtcttttactttctgaaaattttcaaagggtccatgatacctccttttatttttcaaaggagaatgctgaccaattctatagtcttctgtggcagtataggctaagaaggcagctgtttgaattatagcaaaagtgtccatagctgtaaagaagtcctttttctctcgggatagagaatcagtgcattaacagggaaggaggcactgggtggcaagggcagcagatcccctcctcggctgcccctggcgcaaacaggacccgctggggaggcaaagccaacgtgggcttggttatactgcagatatattggagaacaatggagcaatctttataaaagattgtgaatctcttttagaagaggctttctcagtagttgacaatattagatttcctaagaacacatgagtatggcagatgatgttattcaagctagaattaagtataaatatattgtataaagtaagctaataagtattttgttttttcccttcttagtctgttgggtaaactagaatatgtcattccaatgaaagttttttttccccctgaataagctatttaatgaataaaatctactgtggaagctaggtgagccctaggagaaagccaatctggtgtaatggatcagacagtgattaaaagggagcttggaaatgaatttgtttacctgtgttcctggattaatgcaaacagcaatctaatatatgatctgaatttagttgaatcaagatgatcctaacccctcttccaaaaagttgtttctgaccaaaaacatgataattttttttttttcgagacagagtctcgctctgtcacccaggctggggtgcagtggtgcaatctcggctcactgcaagctccacctccctggttcacgccattctcctgcctcagcctcccaagtagctgggactacaggtgcccgccaccacgccaggctaatttttttttcgtattgttagtagagatggggttttaccttgttagccaggatggtctcgatctcctgacctcatgatctgcccgcctctgcctcccaaagtgctgggtttccaggcgtgagccaccacacctggccaaacatgagaatgctttcagggtgggcattccttttcagaaaacctcagactagcagggcagggagttgaagttgtaaagtatcacagcctaccttaaaataaagttggcttcagtctgtaatatcaccgtgtcactttcccaaggcctcttccactaataaacctttgcccacttttgtctgtttagggataaaccagcgcaatggattgggggacgctgcacactttcatcgggggtgtcaacaaacactccaccagcatcgggaaggtgtggatcacagtcatctttattttccgagtcatgatcctcgtggtggctgcccaggaagtgtggggtgacgagcaagaggacttcgtctgcaacacactgcaaccgggatgcaaaaatgtgtgctatgaccactttttcccggtgtcccacatccggctgtgggccctccagctgatcttcgtctccaccccagcgctgctggtggccatgcatgtggcctactacaggcacgaaaccactcgcaagttcaggcgaggagagaagaggaatgatttcaaagacatagaggacattaaaaagcagaaggttcggatagaggggtcgctgtggtggacgtacaccagcagcatctttttccgaatcatctttgaagcagcctttatgtatgtgttttacttcctttacaatgggtaccacctgccctgggtgttgaaatgtgggattgacccctgccccaaccttgttgactgctttatttctaggccaacagagaagaccgtgtttaccatttttatgatttctgcgtctgtgatttgcatgctgcttaacgtggcagagttgtgctacctgctgctgaaagtgtgttttaggagatcaaagagagcacagacgcaaaaaaatcaccccaatcatgccctaaaggagagtaagcagaatgaaatgaatgagctgatttcagatagtggtcaaaatgcaatcacaggtttcccaagctaaacatttcaaggtaaaatgtagctgcgtcataaggagacttctgtcttctccagaaggcaataccaacctgaaagttccttctgtagcctgaagagtttgtaaatgactttcataataaatagacacttgagttaactttttgtaggatacttgctccattcatacacaacgtaatcaaatatgtggtccatctctgaaaacaagagactgcttgacaaaggagcattgcagtcactttgacaggttccttttaagtggactctctgacaaagtgggtactttctgaaaatttatataactgttgttgataaggaacatttatccaggaattgatacgtttattaggaaaagatatttttataggcttggatgtttttagttctgactttgaatttatataaagtatttttataatgactggtcttccttacctggaaaaacatgcgatgttagttttagaattacaccacaagtatctaaatttggaacttacaaagggtctatcttgtaaatattgttttgcattgtctgttggcaaatttgtgaactgtcatgatacgcttaaggtggaaagtgttcattgcacaatatatttttactgctttctgaatgtagacggaacagtgtggaagcagaaggcttttttaactcatccgtttgccaatcattgcaaacaactgaaatgtggatgtgattgcctcaataaagctcgtccccattgcttaagccttca

SEQ ID NO: 35 - DNA, 46299 bp, Homo sapiens
ggggaggagccaagatggctgaataggaacagctccggtctacagctcccagagtgagcaacgcagaagatgggtgatttctgcatttccagtcgaggtaccgggttcatctcactagggagtgccagacactgggcgcaggtaagtgggtgcgcgcaccatgtgagagccgaagcagggcgaggcattgcctcactcgggaagtgcaaggggtcagggagttccctctcctagtcaaagaaaagggtgacagacggcacatggaaaatcgggtcactcccacccgaatcctgcgcttttccgacgggcttaaaaaatggcgcaccacgagattatatcccgcacgtggttcggagggtcctacgcccacggagtctggctgattgctagcacagcagtctgagatcaaactgcaaggcggcagtgaggctgggggaggggcgcccgccattgcccaggcttgcttaggtaaacaaagcagctgggaagctcgaactgggtggagcccaccacagctcaaggaggcctgcctgcctctgtaggctccacctctgggggcagggcacagacaaacaaaaagacagcagtatcctctgcagacttaaatgtccctgtctgacagctttgaagagagcagtggttctcccagcacgcagctggagatctgagaacaggcagactgcctcctcaagtgggtccctgacccctgacccccgagcagcctaactgggaggcagcctccagcaggggcagactgatacctcacacggccgggtactccaacagacctgaagcttacggtcctgtctgttagaaggaaaactaacaaacagaaaggacatccacaccaaaaacccatctgtacatcaccatcaacaaagacaaaaagtagataaaaccacaaagatggggaaaaaacagagcagaaaaactggaaactctaaaaagcagagtgcctctcctcctccaaaggaacgcagttcctcacgagcaacggaacaaagttggacggagaatgactttgacgagctgagagaaggcttcacacgatcaaattattccgagctacgggaggaaattcaaaccaaaggcaaagaagttgaaaactttgaaaaaagtttagaagaatgtataactagaataaccaatactgagaagtgcttaaaggagctgatggagctgaaaaccaaggctcaagaactacgtgaagaatgcagaagcctcaggagctgatgcgatcaactggaagaaagggtatcagtgatggaagatgaagtgaatgaaatgaagcgagaagggaagtttagagaaaaaagaataaaaagaaacaagcaaagcctccaagaaatatgggactatgtgaaaagaccaaatctacgtctgattggtgtacctgaaagtgacggggagaatggaaccaagttggaaaacactctgcaggatattatccaggagaacttccccaatctagcaaggcaggccaacattcagattcaggaaatacagagaacgccacaaagatactcctcgagaagagcaactccaagacacataattgtcagattcaccaaagttgaaatgaaggaaaaaatgttaagggcagccagagagaaaggtcgggttacccacaaagggaagcccatcagactaacagcggatctcttggcagaaactctacaagccagaagagagtgggggccaatattcaacattcttaaagaaaagaattttcaacccagaatttcatatccagccaaactaagcttcataagtgaaggagaaataaaatactttacagacaagcaaatgctgagagattttgtgaccagcaggcctgccctaaaagagctcctgaaggaagcactaaacatggaaaggaacaacctgtaccatccattgccaaaatgtaaagaccattgagactaggaagaaactgtatcaactaacgagcaaaataacgagctaacataatgacaggatcaaattcacacataacaatattacctttaaatgtaaatggactaaatgctccaattaaaagacacagactggcaaattggataaagagtcaagacccatcagtgtgctgtattcaggaaacccatctcacgtgcagagacacacataggctcaaaataaaaggatggaggaacatctaccaagcaaatggaaaacaaaaaaaagcaggggttgcaatcctagtctctgataaaacagacttttaaccaacaaagatcaaaagacacaaagaaggccattacataatggtaaagggatcaattcaacaagaagagctaactatcctaaatatatatgcacccaatacaggagcacccagattcataaagcaagtcctgagtgacctacaaagagacttaaactcccacaaattaataatgggagactttaacaccccactgtcaacattagacagatcaacgagacagaaagtcaacaaggatacccaggaattgaactcagctctgcaccaagcagacctaatagacatctacagaactctccaccccaaatcaacagaatatacatttttttcagcaccacaccacacctattccaaaattgaccacatacttggaagtaaagctctcctcagcaaatgtaaaagaacagaaattataacaaactatctctcagaccacagtgcaatcaaactagaactcaggattaagaatctcactcaaaaccactcaactacatggaaactgaacaacctgctcctgaatgactactgggtacataacgaactgaaggcagaaataaagatgttctttgaaaccaacgagaacaaagacacaaaataccagaatctctgggatgcattcaaagcagcatgtagagggaaatttatagccctaaatgcccacaagataaagcaggaaagatccaaaattgacaccctaacatcacaattaagagaactagaaaagcaagagcaaacacattcaaaagctagcagaaggcaagaaataaccaaaatcagagcacaactaaaggaaatagagacattaaaaacccttcaaaaaattaatgaatccaggagctggttttttgaacggatcaacaaaattgatagaccgctagcaagactaataaagataaaaagagagaagaatcaaatagacgcaataaaaaatgataaaagggatatcaccaccgatcccacagaaatacaaactaccatcagagaatactacaaacagctctatgcaaataaactagaaaatctagaagaaatggataagttcctcgacacatacactctcccaagactaaactaggaagaagttgaatctcttaatagaccaataacaggagctgaaattgtggcaataatcaatagcttaccaaccaaaaagagtccaggagcagatggcttcacagccgaattctaacagaggtacaaggaggaactggtaccattccttctgaaactattccaatcaatagaaaaagagggaatcctccctaactcattttatgaggccagcatcatcctgatatgaaagccgggcagagacacaaccaaaaaagagaattttagaccaatatccttgatgaacattgatgcaaaaatcctcaataaaatactggcaaacggaatccagcagcacatcaaaaagcttatccaccatgatcaagtgggcttcatccctgggatgcaaggctggttcaatatatgcaaatcaataaatgtaatccagcatataaacagaaccaaagacaaaaaccacatgattatctcaatagatgcagacaggcctttgacaaaattcaataacccttcatgctaaaaactctcaataaattaggtattgatgggacgtatctcaaaataataagagctatctatgacaaacccacagccaatatcatactgaatgggcaaaaactggaagcattccctttgaaaactggcacaagacagggatgccctctctcaccactcctattcaacatagtgttggaagttctggccagggcaattaggcaggagaaggaaataaagggtattcaattaggaaaagaggaagtcaaattgtccgtgtttgcagatgacatgactgtatacctagaaaaccccattgtctcagcccaacatctccttaagctgataagcaacttcagcaaagtctcaggatacaaaatcaatgtacaaaaatcacaagcattcttatacaccagcaacaaacagagagccaaatcatgagtgaactcccattcacaattgcttcaaagagaataaaatacctaggaatccaacttacaagggatgtgaaggacctcttcaaggagaactacaaaccactgctcaaggaaataaaagaggatacaaacaaatggatgaacattccatgctcatgcgtaggaagaatcaacattgtgaaaatggccatactgcccaaggtaatttacagattcaatgccatccccatcaagctaccaatgtctttcttcatagaattggaaaaagctactttaaagttcatatggaaccaaaaaagagcccacatcgccaagtcaatcctaagccaaaagaacaaagctggaggtatcacactacctgacttcaaagtatactacaaggctacagtaaccaaaacagcatggtactggtaccaaaacagagatatagatcaatggaatagaacagagccctcagaaataacgccacatatctacaactatctgatctttgacaaacctgagaaaaacaagcaatggggaaaggattccctatttaataaatggtgctgggaaaactggctagccatatgtagaaagctgaaactggatcccttccttacaccttatacaaaaatcaattcaagatggattaaagacttaaacgttagacctaaaaccataaaaaccctagaagaaaacctaagcattaccattcaggacataggcatgggcaaggacttcatgtctaaaacaccaaaagcaatagcaaccaaagccaaaattgacaaataggatctaattaaagagcttctgcacagcaaaagaaactaccatcagagtgaacaggcaacctacaaaatgggagaaaattttcacaacctattcatctgacaaagggctaatatccagaatctacaatcaactcaagcaaatttacaagacaaaaacaaagaaccccatcaaaaagtgggcgaaggacatgaacagacacttctcaaaagaagacatttatgcagccaaaacacacatgaaaaaatgctcaccatcactggccatcagagaaatgcaaatcaaaaccacaatgagataccatctcacagcagttagaatggcaatcattaaaaagtcaggaaacaacaggtgctggagaggctgtggagaaacaggaacacttttacactgttggtggcctgtaaaccagtacaaccattgtggaagtcagtgtggcgattcctcagggatctagaactagaaataccatttgacccagccatcccattactgggtatatacccaaaggactataaatcatgctgctgtaaagacacaagcacacgtatgtttattgcggcattattcacaatagcaaagacctggaaccaacccaaatgtccaacaatgatagactggattaagaaaatgtggcacatatacaccatgtaatactatgcagccataaaaaatgatgagttcatgtcctttgtagggacatggatgaaattggaaatcatcattctcagtaaactatcgcaagaacaaaaaagcaaacatcacatattctcactcataggtgggaattgaacaatgggaacacatggacacaggaaggggaacatcacactctgaggtctgttgtggggtggggggaggggggagggatagcattgggagatatacctaatgttagatgtccagttggtgggtgcatcgcaccagcatggcacatgtatacatatgtaactaacctgcacattgtgcacatgtaccctaaaacttataataataacaaataaataaataaacaaaacaaaacaaaagtatctttccacctcttggatgtagtactgtctctgaaaaaaggggaaaggctttgctggcgacagcctgagtactgacaatctgagtctcatctggcttcccccaatgtcatggactactgttcggtgccgaaggcttactcaaagacagacgcattggaagcctccaaaagaaaacttcattccgttaagttctacacattgtgttgcagggctgaaaaagcacgagtgtccgcactatgacaaaagaaaagcggcgtctcctcaaaacaccaccatgttcccctatgagtctggtgagccaagacactaagaaactgcaggaaacgagagagttctcggggtgggggtgtccatggatgaagcaccgaacaaactggagcccgcaaggtgagtacgggaaatgggctctgtggggccagagagcttcaccgacttggggtgcgggtacagggagtccacggagaggcaaagatttgggctatccgagaggacgctccctccctgggagggagaccggcagggcagctgggaagggcagagacgggagcgtgatggtgcggccgccctggcccctccaggccggcgcccagccactcaacaccaccgaagccgccgcttacctttcgcggggtcacctcctctcctcgcccgagacgccccgccccgcttcgccgccccgcctgctagagagagcggcggagggcgccccgcccggcgccacagcgtcccctgtcttccggaggctgcggcgcagcggcgcggggctgcggggacccatccagtgctagcctttccggttctgaggacctcgcgcccctccttggggtctgcgggctgaagtgtgcaagggacgtttttgctttcttccctttttgacctttagttttccacctcccaacttcaaattacgttccagttcggtgtgtatgtttgtataaataaaaggagacatctcctagaagtatgtttatttcatgaaagtggaaagcattctgatttgggaaagaaagctagatctgatttcttcctacccctactttaggggaacagtcatttaagtgtagagttaatactctgccattacgttagggccttgagagtccaagatgcaggatgtatgcaggtgcagttgagacaagaatagatatagggatgctggtttgcacatactttgctgatgtttaagtttgttgggatacacgtgaaaactgatgtggtttggctctgtgtccccacccaaatctcatatggaataatagcccccttgtgttgaaggaggggcctggtgagaggtcactgaatcatggggccgacttcccccttgccattcccatgatggagttctcagaagatgtttgtttataagagtgtagcacttcccccttcacactctctctctttctctctctctcctgcaccacggtaagacgtgcttgtttcctcttccaccatgattgtaagtttcctgaggcctctggagccatacctcctgtacagcctgtggaactgtgagctaatgaaacctcttttctttataagttacccagcctcaggtggttctttctagcagtgtgagaagagactaatacaaaaaccaaaaataaaattctaagcaccaccatcaccaacccacccctgaaaggaatggacctctgtcttggccaaggtaatctcaaaaaaaccctgaaaaatgagttcaggccctgatgggaaggggtgggcggttggatatgcctcattataccttcctcccgttggaggttagacacaactgaccagcattaacattaaaacggagatcgtaagactggtaaaatatactgtagcaataagaaaattccaacctgactctggaataacatcacgtgacacatagtgggacctgaaagaaataaaaatatgttaccccaaaatatatttatttgactattttgaaatggcctcgcaaagctgtctcttgttggggaaaacttacattctatagaaaatctctttcccttactagatcttttttttttttttttttgagatggagtgtcggagtgtcactctgtcacccaggctggagtgcagtggcatgatctcggctcactgcaacctccacctcctgggttcaagcaattctcctgcctcatcctcccgagtagctgggactacaggtgtatgccaccaagcctagctaatttttgcatttttaatagagacagagtttcaccatattggtcaggctggtctcgaactcctgacctcaggcaatccacccacctcggcctcccaaagtgctgggattacaggcgtgagccactgtgcctggccccttactaggtcttttccagagagtctgacatcttttaaggtctgataagagacattcacatctattctttgaagccagctacccggaggctttatctacataaggagaaccttggctgccacaacacccccgcttaccttaactccagctggcttcacatcttcaggcagagcttaactctttcaactaattgaaaatgtgaaaaatctttgaattcatctttgacctggaagcccacccccacgctgctttgagatgggccaaaccaatgtataccttacatgtattgatacatgtctttgcctgtaacttccatttctctaaaatgtataaaatcaagctgtagcccgaccaccttgggcacatgttctcaggactgcctgaggctgtgtcacaggccatggtccttaacattggtgaaataaacctctaaattgattgagacctatctcatagactttctggtttacacaagttatattaaaatgaacagaatagttggaatagaaggtaccaatattttggcatgggtttatgtaaagctttggtaaatatgtttcgaatttaaaactttttctcccaagccaaattaacttcacatttgatttgaggtttaatttttaaaaatttttaatatttatgtgtatgtatttatggggtacatgagatattttggtacaagcatacaatgaataataatcacatcagggtaaatggggtatccaccacatcgaggatttatcatttatgttacaaacattccaattatacccttagttatttttaaatgtacaatcaactattgctgactgtagtcaccgtgttgtgctatcaaatactagatcttattcattttatctgactatacttttgtacccgctaaaaatccccatttcccactccccccatccccactacccttcccagcctctggtaaccatcattctactctattttcatgagttcttttgttttaatttgtatctcccacaaataagtgagaacatgcaaagtttgtcttcctgtgcctggcttatttcactgaaaataatgtcctccggttccatctatgtggttgcaaattgttttttatggctgaatagtactctgttgtgtatatgtaccacattttctttatccatttatctgtcgatggacacttagattgcatctaaattgggttattgtgaatagtgctgcagtaaacatgggagagcagatatctttttgatgtgttgatttcctttcttttaggtatatacctggcttgaggtttaatttttaaaagttcattgacaactggtattacaaggcaatcttctgacaaaataagttaaatttcaattaaaaagctgttactgcagtagctaaaaacaattggaaggctataaaatattattatgttgcatcctaagcagacccaaacttttttcttatcccttagggttctcagtgatctgtaacatgtcaaatatcactatggaaacaaagtacttttactgtcatgatcaatagaaagtgatcagatgaaagaatacaagaaacataagcatgtgtaagaaaagagcacaagctgtaggtaaagataacagagaaaagcctgaaggccttgcccatttcatggatatgaatacaatgtgaatgataggacgtgtttagtcatttttgtttataattcattccattttatgctgcttttaagaaattactttgaagagtgatgccaatctgattcggcttttgtaatcttcattttgagcagggccatcaatatttaataatatttccaggagattttgtatttgatgggattgcataaagcaaagattaatctgtatgaaaacacattcaaagggaccaatgatatctattttaatctggggttcccaaagtgtgctctgggaacaacactggtggtctgggagccttctcaagggaccactgatgccactagcgctttttaaaattcaggcaagaatagttggttgacaatatttaataaaaatcatacattactggtattttgtcaaagccaggtctttttttaaaaaataataacataaatgctggcacttatttcttttcctaccagaaagccaagccaaagtagttgatatgatcaatgtgagccaaggatatctgactcccttgaatgaattattagctgacaaatgaaaaaattacacgttttggtaatttgaaaaaatcttcctaattcttcacccctccctgtgtccccacctttatccatgctctcccactctgactctggggggtcacccttgtgatttatttttgctaatatgatattagcaaatgtcacacaaaataagctggaaaaacacctgaactggtaaacatactccagctagcctgctggagatgaaaaacatacagagcaaagccaagtcatcctagtcattccaactgaagccactgtagattgaccagacaggtgtgcaagccttgagtgaggtcagtcaagcctgcccagatcagctgaactctgcagattcatgaacttaaatatgtgtatttttgtttgccacattgaggttcagttcgttgttgtgcagaattatggtgccaatagaaactgataatatgccctccattgtaaattccctgggatcaaagagtatttgcctgatagcttaaggagcagtctgttttctagtggtgcttgtaagaaggacaaacatcttgctatttttgaaaactgtatagctgtctggcatcacaggaatgtctgacctgggaagaaaatgaaatctatcaaatggtgtgatatataaattagtaaaaaaaaaaaaaaatagaatggggaactgatattattagaggatcacaattcattactctttttcttccatataattttagcagaactgtttttaatacttttcatgtcaggtcattttgtatttacttctctcacattttgaaatattagaaataataataatttattctatattatttaaagtcttaaagtaccttaaaagtgatatgagatgaaaacattttaattctaactgttcttcttttgaaaaaagcataagtttattatcagtgtagttaggctcaggttagcaggaaaatttttggtgcattcagtgtgccacatgctttcctgggcaccaggaattcaaagatgattaagacataatctttgcccttaaaactcttaaagattagtgagggaggctggccaccatggctcacgcctgtaatcccagcactttgggaggctgaggcgggcagatcacctgaggtcaggagttcaagaccagcctggctaaaatgatgaaaccccatttctactaaaaatacaaaaaattaactgggcatggtggcgcgtgcccgtaatcccagctacttgggaggctgaggcaggagaattgcttgaacccgggaggcggaggttgcagtgagctgagatcacgccattgcactccagcttgggcaacaagagcgaaactccgtctcaaaaaaaaaaaaaggaaaagattaaagattagtgagggagacaaattaaaacagataatttcttgttgtttgtttgtttgtttgagacagggtcttgctttgtcgcccaggctagagtacagtgccgcaatcttaactcactgcaatctctgcctcccaggctcaagcaattcttgtacctcagcctcctgagtatctggagttataggcgtgtgccatcatgcccggctaattttttttttttttgtatttttagtagagacagggtctcaccctgttggccaggctggtcttgaactcctgatctaaactgatccatccacctcagcctcccaaagtgctgagattacaggcatgagccaccacgcccagccagatactttcaatataaagtgatttgcacaagattctatggaagcacagagaattatatgttgtttggcctggatataacacagaggatggtatgtggctgatgactgagcccagaatcacaatcaaagtgataagcaaggcaaagaagttagaaaggatgtttcaggtcagaggagacagaatgaacacaaacctcaaagcatgaagccatatagtgtggtgcggtgtgtttcttattgctaaagaatggataataaaatggaacatgagagaaatgacactggagaaacagatggggccagtccaggaaggctcagatgcatccacgtttagggaatgagtacagcaggagaccacaaaagggtttgagaagaaatggtcaaaacagagtgaggaagatcaaaagtggagtgttttgaaagccaaaggagtcaagatgattaagaagattaatgccccagtggctttgccaccagccaagctcccctacaagctgttgtcctcctttctaaaatatacatctaatcatgtcactgtttggcttcacacttcctgatggaacactctttcctacacctgccctttgcctcactcctacttatccttcacaaggataatcaggggaggcatcactcccatagctcagccctgcttggtgtgtaggaattgtattctctgggagctgacttttggagaagaactggagctatgcaagaaaaagaaaaggctaagaaacagaaataattttatgaggaggggactagagcaggacaatcctgagctcttgcagagattgggcacatggatccagcaacttctacccccacccattcaaaatatctagtgactagcataggagttgataggaaaggcgatcatttccttcttgcttaagtgggagggaagatatctgcgcatcagctcatgtatacagaagaaattgagaacagcaagttttcttgttccttggccaactgaaaacaaatctgatcccctaaagggatggtgatcaggaagaagctgaagagagaatttgttgaatatagggtcttgaagactcagcacacacctgttatttcagttgcaaatgacagaaacttgactgaaactaactcaagttcaaaaggagttatgttaccatatgtaatgggaagtctatggagggaacagatttcagcagtgagatatgggacatccaaacatgtcaacaggaatgtcttgtctcatgtctccattctgtttctttctttctttctttttttttttttttttttttgagatagagtcttactctgctgcccaggctagagtgcagtggtgtgatcttggctcactgcaacctccacctcccaggttcaagtgattctcatgcctcagcctcccaagcaatagtaactacaggcacaccccactatgccctgctaattttttttggtatgtttagtagagatggggttttgccatgttggccaggctggtcttgaactcctgacctcaggtgatccacccgccttggccacccaacgttctgggattacaggtgtgagccaccgtacctggcctctattctgtttcttaaatacactcatttcatatattgggcacatccctgctggcagctccaggtttctatcctgttaaaatacatccaagtggaaaggaagccttccctatcacccatatatcaaatctcatggaacaactcttttggccttgtttgggtttgtgccctttttcaggacaaattgctttggacaggaggaaagatatcattgctggacaggccagggttaaggtcacattatcataattgtggaggtgcagttccccaccagttgggttgggaaacagatgctaggaagatgaaatcagcagacgcccacttcacacaaggggtcggcggggaatatgctcctgaaaagcagcatccagaaaacaactcttttccactgagtggtgcttttgccacatttttgtggaaaagagatgctttcttccaatggtggctaattaaatgagggggccagagtggaaagatagctgggcctatctttgctctgagtacacatgagagagctatcgtctctgagtgcacaagagagattcctgagttacctaaaaaaagtttattatttcctgacatcatatgatttatttctttattgtttctcttctccattagaatgtcagttctgtgaaggcgtggatgccccaggaaagttccatggagctccatgcaagctccattcctaaatgcgttaagttttgcttacagctggattcccagatatattaaagagttccagaaatattaattgaaagaatgttgagtagactagggagatgttaagtaaggaggtggggtgccatggtgaagtgaagtaaccaatgcattgctttgaatccatagaccctgaggggccacttgcccagaatgaaggtgggagtgagataaagtcaaagagggctaagtggaagagagtggaactggtcaggatgggcctacagcctctatccatgtcctaaaaaattccgtagcttcttcccacagcacccagggttacagaaacaacttgtctcaaggtgctgaggcacaggtctcttatttcttcataaacttcatcccataactgaaataaaaacacaaagaaacccctaaactcacccttcttcttacttttctacccttgcccaaacctacttcccagaaaggagggaaaaaaggggagccctctgagatagagaggggcccgtgtgaggctttgttgcagatcttttgtaactagccacacccttgggtagggagggctaaggtcctaaagtttccagggagaagcaaataagtcagtgaaatgccagtatcaatgttctaatggccttatatttacccagatactagaaaagcatggaaacatttaggttgtactagaaattgctgcttaccatacagtgcctgtgaaataaaacaactttaatgtagatataaaaagcagtaccttatgaaatgtatagctatttaggggagatgtcccagagcttaacagatgaactcacaagatttcttagtgcttctgaagacttgtcaattggtccaaaacatccacatcccctcagcattatcctgcatgaggagttctcaaacttgagcatgcattagaatcacctggaggatcttgttaaaacacagattacaagatcccattctcagagcctctgattctgtagtctggagtgggcctgggaatttccgtttttaaaaagttctgaggtgctgctgctgctcctcaaaccccactttcagaaacgctgacctacatgataaggtgatttctttccttttccatttgccaaataagtcataattgctttttattacatagtttctactttggggagagagacgtgtgatattttaactcaaaagaattctctgaagatttatatttctgacctagtgaagcctccaacacaacagacataacaaccatttcagatggttgagatttgaatatgattggaattaataataaatctttatggattaggaatggggcaattttatttgaatacagtgacatttatcctgagaaggtacttcacaagacttacaagaaatacagagattttgggaagattaaaactctatttttaactccatccttttagggcataaagcaaataattgagttacttacatgcattagctataataaagtcctttactgtaatagtcctaaaagggtgtcccataatgcctcaaataaaactgaaaagtcttaagttcaataagtagtaggaagaattccttctcttttatttttgtctatctttttatcccctttcttctcctgttccttgatacatttgaaaacttgtgaggttttcctcaaatcatttagaagttgttatacaatagatgacacacaggcaggattatttgtagattaccgtcattgttttattcacagcagagctgtgaatgtgccaaattaagataacccagtgacaagctaagtgcttttcttgattaatgatagaagttgtttaaaatgcacagtgaaaagactgaaatctccaggagaggacagtctcacatggtaacaggacttttgggtttttctaatctgaacaagatgctcaccttatttctgtttcagatcactaaacctctaccactcattccaagcaactaggaatgccctgtctctttcagccatggctcataaacatcatatattacacgttttcttcctgaagaaagtagagctttgatcaatacaatttgaatagggaggcgggtaaagagtgttctgccatttccccatgaatgtctgataaaataaggcaaagtggcagcaggtatgtaataacggaaactgggtgaatcaaggcaaaagggataattggcttgtatacttgtaagagattctcttcttttgttaaaatgttctttaatactgttgttgcatttattttcaacaacatacttaaggcataaactggtgctaaacttagagctttgccttgaccacctccagttttttttttgtttttttttttgtagacagagtctcactctgttgcccaggctagagtgcagtggtgtcatctcggctcactgcaacctccgcctcgcgagttcaagcaattctttgcctcagcctcctgagtaactgggattacaggtgcctgccaacatgcctggctaatttttgtatttttagtagagacggggtttcaccatcttggccaggctggtcttgaactcttgacctcgtgatccatccacctcagcctcccaaagtgctgggattacaggtgtgagccactgcacccggcccgaccacctccagtttttaagtaaactttttgtttaattgaagtataacatatgaatagaaaagcatacaaattctaagtctactgcttgatggattttcacaagtgaacatactcaggtaaccaacatccaaaataagaactggaatatcaccagcatcctagaatcccttatgtctcctcccactcactatccactccctcccctgggaactgacttttttatttctatcaccacatactagttcttttttagttttaggctttacaattcttcatactgatgcatttattagttcattattcattcccattgatgtctaatattccatagtattaagaatcaagggtacctgcatcagcctgaacttaactatgggactgagagctgagaccacctgtgtcaatattattgcttttattccccaagaaattcttgccaggaaaaatgtgattgcagaacaataaagtactatactgtttgtatcagcaaattctgcaaaccaatttatacaatcagtttgcttactgaggtaaacagctcacttaatcaggacaatagtttgctcttcataaaactcatctccagactgtcaccttactgtgtccaccagtcctaaaatactgtgtcatgaacttcacacattcctatcaattccccaccttgaaatacctgccttaacctcatgaatccagaatcccaaaccctgtatatattcctctgtgatttctctttttagagacactaagactgtgtaagctttgcttggtcaacaggtttttctggtggtctttgtgaggaggttgacaatatgaatatttcccaatgtatctacccattctaatgttgatgggcatttgggtatttccagtttgaggctattatgaatagtgctgttgtgaacattattgtattttgatgcacatatgtatatatttgggattggaattgctaagtcattggtaaccatatgttcaattttaatagattcaatagtttttcaaagtgattgcaccaatttatactcccagcagaagtgaatgcaagtttgtttccatatcttctcagcaatacttaatagtgtcagtctttttggtattagccattctggtggctgtgtagtggtagcacattgtggtttaatttgtatttccttgatggttataattattctcttttcatatgcttatttttaaactttttatttggaaataaagatagacttacaagaagtttattccttattttctcttttggctcctgcttttggaatcatctctaagaactctgcctatccccagtttgtgaagatttgtttctgtgttttcttctgaaagttttatagtaatataatatgttttacatctagatagatgattcattttgagttaattcttatacaaagtgtgtttaagttaagatgttttggttaaggttcaatattttggcgattagtatccatttatatgcttattttccattggggtatccttttttacaaagtacctgttttttggctttgattgagcttctcaatttttcttgttgatttgtatgaatatttggtttatttttttttatttcaatatgttttgggggaacaggtggcttttcattacatggctaagttctgcaatggtgatttctgagattttggtgctcccatcacccaagcagtgtacatggtacccaatgtgtagtctttcatccctcacccccctcccacacttgtttatgttttcttattaatttttatgaattctgtataggtgctggatatagttttcttgtcagatacatgtattgcaaatatcttctcccatcctctgattgcctttttactctcttgatggtgtcttctgattaacaagttcttaattttaatgaaattcaagttatcaattcctcgaaacactgaaattcaatttattaggccttatgattagtgcttttcatatcatatctaagaaatcttttcctacaccctggtaatgaagatattcttctttgttatattctaaaatctagaaactttattattttatctttcttgattacatctaccatccttctacagttgtattttgtgtatcgtgtgagttagcaatcaagatgaattttttttccatatggatttccaattggcccagcattgtttattgaaaagaccattttctcccccattacactgcagcatcaccataaaagattaaggactatataggaaaccagcctgttgcatgaaagagtgatccatcttgatgcaaaattaccatgatgaccaatgtttgactcttgcataccaaggtgttctgcagcaaggtctttaaacaatgctcatagcacagacaacccctcataaagctgcttctctgacctctccagtagtcacaagtttcagcaagaaagtctgagatatgagcagctgtatgtcttaccacaaaagcttcctatagaaaggatactttctagagggtggatgcagggattcactgtcttacagccaccagaaacatggtttctgtttttaagtccctattaaatattttcttttttcttctctgatcaatacatctcaaaacagaagaaaaaaaatcaatattttctttctgagaaactggttttgtcagcctcttccttcagcctttcagctcccttggcctttggggtaggttgcatatacctgctcaccacggaagagactgtgtatgtgtgggtctgtttctgagctttcagagaattggactgtgcaattgtgggagctggttgaacagtctctgtgaggccgttgtctccatgtgtgatgctggagtgggaagtccacgatgcaggcagtcaggcagggaagactctggaaggctggaactcaaaagcacaagctggaaatccataaggaagaactgaaacatttgtcttgttgcctctgaccttggtgacaagggtatcctgcagaagcctgtgcccttcattacaaagctaaacacgtacctggcccatgagtcagggaagatgaaggaggatccaggagaatgtagagcaattgcaggcccagctgctgcttcacaccaacaaggtgaatcagtgtgacagcaacaacgtgtgtcagccgccaaggctgtggcttctcttccaaacctcccacatctctccctgactgtccatgccaatcggaaacatgcaagaaagggaattcagcccagccagagggacacttccagtattcattacagatgattcataatatctttgtctttttttgtcaggaaaaggagatggagatgtgttccctataagattattttaattgggtaaatttagattgcaattcttttctttcagcacgtcatatatgtcattacattgtttttctggaatcctttatttttattattttgtttctttaaaagtcatgcatttttttttatctggttgcctttaaggtcttctctgtctctggttttcagtagtcttatcacgatatgcctcagtaagttttcctttgtgttaatcctccttgggattcataaagattcttgaatatatgtcatgataatttttgcatgattgagaaaattcttggccaataatcaaaattatttctccctattttctcttttctctcattttggactctgaggatttatattttaaacttttcattatgccccaaatgtctttttcttttttgttaaatacatattcatcttattttctctcaatgcttcaagtgacattttctactgatttgttttccagattaataaatcttttttcagttaatctgctgttaaagctatcttttgcagtcttaatttcagttacgggatattaattagaatctgtaattgatttttttattatactttaagttctagggtacacgtgcagaatatgcaggtttgttacatatgtatacatgtgccatgttggtgtgctgcacccattaacttgtcatttacattaggtatatctcctaatgctatccctcccccctcccccgaccccatgtcaggccccggtgggtgatgttccccttcctgtgtccaagtgttctcattgttcaattcccacctataagtgagaacatgcggtgtttggttttttctccctgtgatagtttgctgagaatgatggtttccagcttcatccatgtccctacaaaggacatgaactcatcattttttatggctacatagtattccatagtgtatatgtgccacattttcttaatccagtctatcattgaaggacatttgggttggttccaagtctttgttattgtgaatagtgctgcaataaacatacgtgtgcctgtgtccttatagcagcatgatgtataatcctttgggtatatacccagtaatgggatggctgggtcaaatggtatttctagttctagatccttgaggaatcgccacactgtcttccacagtggttgaaccagtttacagacccaccaacagtgtaaaagtgttcctatttctccacagcctctccagcacctgttgtttcctgattttttaatgatggccattctaactggtgtgagatggtatctcactgtggttttgatttgtatttctctgatgtccagtgatgatgagcattttttcatgtgtctgttggctgcataaatgtcttcttttaagaagtgtctgttcatatcttttgcccactttttgatggggttgcttgtttttttcttgtaaatttgttggagttccttgtagattctggatattagccctttgtcagatgactagattgcaaaaattgtctcccattctgtaggttgcctgttcactctgatggtagtttcttttgctgtgcagaagctctttagtttaattagatctcatttgtcaattttggcttttgttgccattacttttggtgttttagacatgaagtccttgcccatgcctatgtcctgaatggtattgcctatgttttcttctagggtttttatggtttttggtctaacatttaagtctttaatccatcttttttttaatagttttttttttttggctaaaaatttttttttaaattttattattatactttaagttttagggtacatgtgcacaatgtgcaggttagttacatatgtatacatgtgccatgctggtgtgctgcacccattaactcgtcatttagcattaggtatgtctcctaaagctatccctccccactctccccaccctacaacagaccccagagtgtgatgttccccttcctgtgtccatgtgttcccattgttcaattcccacctatgagtgagaatatgcagcgtttggtttcttgttcttgcgatagttcactgagaatgatgatttccaattcatccatgtccctataaaggacatgaactcatcattttttatggctgcataatattccatggtgtatatgtgccacattttcttaatccagtctatcattgttggacattagggttggttccaagtctttgctattgtaaatagtgctgcaataaacatacgtgtgcatgtgtctttatagcagcatgatttatagtcctttgggtatatacccagtaatgggatggctgggtcaaatggtatttctagttctagatccctgaggaatcgccacactgacttccacaatggttgaactagtttacggtcccatcaacagtgtaaaagtgttcctatttctccacagcctctccagcacctgttgtttcctgactttttaatgatggccattctaactggtgtgagatggtatctcattgtggttttgatttgcatttctctgatggccagagatggtgagcattttttcatgtgttttttggctgcataaatgtcttcttctgagaagtgtctgttcatgtccttcgcccactttttgatggggttgttttttttcttataaatttgttggagttcattgtagattctggatattagccctttgtcagatgagtaggttgtggaaattttctcccattttgtaggttgcctattcactctgacggtagtttcttttgctgtgcagaagctctttagtttaatgagatcccatttgtcaattttggcttttgttgccattgcttttggtgttttagacatgaagtccttgcccatgcctatgtcctgaatggtaatgcctaggttttcttctagggtttttatggttttaggtctaacgtttaagtctttaatccatcttgaattgatttttgtataaggtgtaaggaagggatccagtttcagctttctacatatggctagccagttttcccagcaccatttattaaatagggaatcctttccccattgcttgtttttctcagatttgtcaaagatcagatggttgtagatgtgtggtattatttctgagggctctgttcttttccattggtctatatctctgttttggtaccagtaccatgctgttttggttaccgtagccttgtagtatagtttgaagtcaggtagtgtgatgcctccagctttgttcttttggcttaggattgacttggcaatgctggctcttttttggttccatatgaactttaaagtagctttttccaattctgtgaagaatgtcattggcagcttgatggggatggcattgaatctataaattaccttgggcagtatggccattttcataatattgattcttcctatccatgagcacgggatgttcttccatttgtttgtatcctcttttatttccttgagcagtggtttgtagttctccttgaagaggtccttcacatcccttgtaagttggattcctaggtattttattctctttgaggcaattgtgaatgggaattcactcatgatttggctctatgtttgtctgttattggtgtataagaatgcttgtgatttttgcacattgattttgtatcctgagactttgctgaaattgcttatcagcttaaggagattttgggctgagacaatggggttttctagatatacaatcatgtcatctgcaaacagggacaatttgacttcctcttttcctaattgaataccctttatttctttctcctgcctgattgccctggtgagaacttccaacactatgttgaataggagtggtgagagagggcaaacctatcttatgccagttttcaaagggaatgcttccagtttttgcccattcagtaagatattggctgtgggtttgtcagaaatagctcttattattttgagatacgtccaatcaatacctaatttattgagagtttttagcatgaagggctgttgaattttctcaaaggccttttctgcatctattgagataatcgtatggtttttgtctttggttctgtttatatgctggattacgttcattgatttgcatatgttgaaccagccttgcaaaccagggatgaagcccacttgatcatcgttgataagctttttgatgtgctgctggatttggtttgctagtattttattgaggatttttgcattgatgttcatcagggatattggtctaaaattctctttttttgttgtgtctctgccaggctttggtatcaggatggggctggcctcataaaatgagttagggaggattccctctttttctattgattggaatagtttcagaaggaatggtaccaactcctccttgtacctctggtagaatttggctgtgaatacatctggtcctggactttttttggttggtagtctattaattattgcctcaatttcagagcctgttattggtctattcagggattcaacttcttcctggtttagtcttgggagggtgtatgtgtccagaaatttatccatttcttctagattttctagtttatttgtatagaggtgtttatagtattttctgatggtagtttgtatttctgtgggatcggtggtgatatcccctttatcattttatattgcgtcatttgattcttctcttttcttctttgttaatcttgctagcggtctatcaattttgttgatcttttcaaaaaaccagctcctggattcattgattttttgaagggttttttttgtgtctctgtctccttcagttctcctctgatcttcgttatttcttgtcttctgctagcttttgaatgtgtttgctcttgcttctctagttctttcaattgtgatgttagggtgtcaattttggatctttcctgctttctcttgtgggcatttagtgctataaatttccctatacacactgctttaaatgtgtcccagagattctggtatgttgtgtctttgttcttatgggtttcaaagaacatctttatttctgccttcatttcattatgtaccctgtagtcattcaggggcaggttgttcagtttccatgtagttgtgtggttttgagtgagtttcttaatcctgagttctagtttgattgtgctgtggtctgagaaacagtttgttacaatttctattcttttacatttgctgaagagtgctttacttccaactatgaggtcaattttggaataagtgcaacgtagtgctgagaagaaggtatattctgttgatttggggtggagagttctgtagatgtctattaggtctgcttggtgcagagctgagttcagttcctggatatccttgttaattttctgtctcattgatctgtgtaatattgacagtgtggtgttagtctcccattatcattgtgtggaagtctaagtctctttgtaggtctctaagggcttgctttatgaatcttggtgctcctgtattaggtgcatatatatttaggatagttagctcttcttgttgaattgatccctttacctttatgtaatggccttctttgtctcttttgatctttgttggtttaaagtctgttttatcagagactaggattgtaaccccttcttttttttgctttccatttgcttggtagatcttcctccatccctttattttgagcgtatgtgtgtctctgcatgtgagatgggtctcctgaatacagcacactgatgggtcttgactctttatccaatttgccagtctgtgtcttttaattggagcatttagcccatttacatttaaggttaatattgttatgtgtgaatttgatcctgtcattatgatgttagctggttattttgctcataagttgatgcagtttcttcctagccttgatggtctttacaatttggcatgtttttgcagtggctggtactggttgttcctttccatgtttagtgcttcttcaggagctcttgtagagcaggcctggtggtgacaaatctctcagcatttgcttgtctgtaaaggattttatttctccttcacttatgaagcttagtttggctggacacgaaattctgggttgaaaattcttttctttaagaatggtgaatattggcccccactctcttctggcttgtagagtttctgccaagagatccgctgttagtctgatgggcttccctttgtaggtaacccaacctttctctctggctgcccttaacattttttccttcatttcaactttggtgaatctgacaattatgtgtcttggagttgctcttctcgaggagtatctttgtggcattctctgtatttcctgaatttgaatgttggcctgccttgctaggttggggaagttctcctgcataatatcctgcagagtgttttccaacttggttccattctccccgtcactttgaggtataccaatcagacatggatttggtcttttcacatagtcccatatttcttggaggctttgttcatttctttttactgttttttctctaaacttctcttctcgcttcatttcattcatttgatcttcaatcactgataccctttcttccagttgatggaattggctactgaagcttgtgcattggttatgtagttctcgtgccatggttttcagctccatgaggtcatttaaggacttctctacactggttattctagttagccattcatctaattttttttcaaggcttttagcttctttgcgatgcattcgaacttcctcctttagcttggagaagtttgatcgtctgaagccttcttctctcaactcgtcaaagtcactctccatccagctttgttgcattgctggtgaggagctgcattcctttggagggggagaggtgctctgatttttagaattttctcttttctgctctgttttttccccatctttgtggttttatctacctttggtctttgatgattttgacgtacagatggggttttggtgtggatgtcctttgtgtttgttagttttccttctgacagttaggaccctcaggtgcaggtctgttggtgtttgctggagatccactcctgaccctgtttgcctgggtatcagcagcggaggctgcagaacagcgagtattgctgaacagcaaatgttgctgcctgatcattcctctggaagcttcgtctcagaggggtacccggccatgtgaggtgtcagtctgcccctactgggggatgcctcccagttaggctactccggggtcagggtcccacttgaggaagcagtctgtccgttctcagatctcaaactgtgctgggagaacgattactctcttcaaagctgtcagacagggacatttaagtctgcagaggtttctgctgccttttgttcagctatgaccttcccctccagagggggagtctatacaggcaggcaggcctccttgagctgcagtgggctccacccagatagagcttcccggccactttgtttacctactcaagcctcagcaatggcgggcgcccatcccccaccctcgctgctgccttacagtttaatctcagactgctgtgctagcaatgagtgaggctccgtgggtgtgggactctctgagccatgtgcaggatataatctcctggtgtgctgtttgctaagaccgttggaaaagcgcagtattaggctgggagtgacccgattttccaggtgccgtctgtcacagcttcccttggctaggaaagggaattccctgaccccttgtgcttcccgggtgaggcgatgcctcaccctgctttggctcacacttggtgggctgcacccactgtcctgcacccactgtccgacaagccccagtgagctgaactcggtacctcagttggaaatgcagaaatcacccgtcttctctgtcgctcatgctgggagctgtagactggagctgttcctattcagccatattggaaccgcccctctaattgattttttaaatgtattttcatcctctgatgaaattttccatcttgtcatttattttcttgaatacattaatagctattttaaagtccgtattaactaacatcagtatctggatgcttgtcagtctgtttatttttttagcttaaacaaatttttactacacaaagttgtcacataattggatattttcctagtttgtacacaattcttattctctacagaaaggctgcttaacttttcatctggtgatagtaagcactaaaattctgacttatagaatagtagtaaaaatacctctgtgatttaagttgaaagaagtacattggtacatggtggttgcacccaatatcaggaatgcacaaatgtccttttatacaaaaatacaaaataaattatttgtaggcatggacaatggcagcagtaacccattatatattgtcaactgaaaccagtaactgatggttatagtgattttcttaaacatcagccttcagccattttctccaactgacttctctgaagttattggtgaggaacactgccttgagcttcctgtcacagttcattaataaagcactattctaggaataagaacatctcacctcccattccacccactgcacccattccagggttcttccctttagaaatttctgtaattacagcttatgatttagttaacagagtgcaccccagcagcgcccaataaagcagttctcacaatgtttgttgggtcaatttttcctttttccaccatattcataacatagcatcatcaccaacttcttaggaactttgcataattttctcaactatcaaaaatccttcaacacctgcattcttaacaatagtcactgcaggatttttgagtgttcttttaataacttctgtacgaatttttaaatcttcattagctggagttaatgaatccaaggctcaagtgcactggagcaaggcacaaccccctcccagagcaatgccttcttcaacagcagctcttacagcattaagggcatctgtaactctgtctttcattcattcactttgacatcacttgtcccaccagccttcagcactgctactccatctgaaagttttgccagacatacattcagtttttccttttcatattcactagttgtaacatctaactgctcaacgatttcttgaatatatttttcaatttgagccttaaaaggaaaaacattttccttttaaaagcatagcatcatatttggtcaaaatgacctctccaactttttctaagttacgaggctaaatagcttcaaaatttagggctaacccctcttcactaaacaccagaccaccagtagcaatagctgtatcttcacgttggttctttctgttgtcaccaaaatctggagctttgactgctatgatctgaagaccaacttttagcctattaaaaatgaatgtacttcgagcttctctatcaatatcttcagcaattatgaccaaggacttacagtgaggattggcaatttaaagagcaggtacagtggtctggacactagaaattttcatttcattcaatacaacataggcatcctggaattcacatttctaaccttttgacgtattaataaagtatggagaaatatagcctcaatcaaactttatgcctttaataatttctaattcatcattcagtgtttttccatcctttactgtgaggacaccctttcttccaaatttatttgcatcagaaatgatgttgacaatttctttgtctccatttgcagaaatcgtagcaacctgagcaatttctccaggggttgtcatggttcagacagcttcttaagttcagcaattataacatcaacagctaacatcacacttctgatttccacaggattagcacttttgctaatcttttcaaagcctttcttggcaaaagagcatggcagtacaatagcactggtgatggcctccccagcttcttcatttgtgttattagcaacatcttgaacaagtttaactccaatatttttatgtttatcctttacatcaattgactttggaacagtcacaccatcttttgttactttagaacttccccagttgatcaatcattgtttttggccctattgtaacagctacagcatctgctaaaaagtctacaccctgaagcagtaaggcttgggaatctgcaccaaattttacatctttggcaaaatcctgtgagataaggggctagtaccctggacaccggtctcatctggcaagactgtgggtaattgaagcatttctgtcggatggcagcgaggcgtgggtgcggtgagacaggtcgtcagtggcgagtgaggggcgagcccatttccatggttttgattaaatggctgaaattatgcattttacactatagaagttagttctttctagataatgctgttttcctcttgagaagtatttttttgttttgttttgtttttagcttctgagacacagagtaggaacatatcatcttcatcagataaggactccatgtgatttagagttggatttcagccctttcatttcttatttgccttactgaaattctggggtatgtaccaggacttctttacgttggcaaacactgaagactaattttaactcactagcaccaagatatgccaatagctcaacttcagtcctcaacctgacagtattcactttcctcttggttctccacttcttggcctgtgctgcttctatatcagtgaaaacctaagggaaatagagaaggtgaatgttgggttggcttcagtgaattttctttctctcagtgatcttggttccacaatccccagttacactggtggctctctgatgccttcagacaatttaactttgttttgttttttagttatattagccattctagttgttctcagctagaggattgattggccacaaatctgtcatagccaataggaggagagccctccattccctttgattctgtctctgactccagccaatacctgctttcaaggaccagaacacttttacttacttttgattgatcaaacctctttaattctggtgacagagttgttcaaacactctttatctccttgccttgtccaagacaagcccttctctggaggatcatcataagaaaaccaaagagaaagatggccctgcattctagggtcaagtgaactgtttctacaaaatctttaagtcctcaaacccagtctcctcatttgccctgaccctgcctgtccaggtggagtgaggagcaccactaactcagtgctcatcctactagaagctcctgcctcatgacactgtaatcatttgtggaagcctagaaatgtttctataatctactagactaaattccttaaggagcttttattttctgtatattcaattgccttttcatgtgacagtaacttggttaaattttctctagagaatcaacaaagataattcagtcatttctctagtgtagttgtttaaaatgtgctttttattattaacaatttttaattttatattcttttttctgattactttttactaataatatttacactgggaatgatcaatttgtggaaaacttccattaagtttctccatatttggaagatttttccacagactaaaatctgccttgatatatttctcttccaaactcacattcttttgatgctgggtatcactggacacatccaaattgcaatgagacattgatctctgctcctttggttacaacattgggtgagtcagcacagtgggaggtagtatgattcttggaagctacccctataccataacacatagccataaattaactgtaaatatgattgaatgtgaaccacataaatacacctcactaaatcaaaactaagcccaaattagcttacccaaacccttcgttgggtcctgtggccactccaactctatctaacaggaggggaagtgcaatgaaggaaaaattacagtagaaagagacagctgttttgactgattatggttaaaatgtatttgcagattttacagaaacatgttactatgagaacatactgcccaggcccttcccagggcctgacaggggccatgaagcttaaacttcattagcttcagggtaaatctaccttgtatttaaatattattaaagatcagcccctgcaaagagttggctaatttagaatgtcggctctgaaataatcatagaccaagaaaagatggctaggtcttttccctttatataaattcatacatacgatcttggagagattcagtaccacatcaacccccttcccctaatagtctcatgtcaataggacttcccaagaggaggaacaaaagagtaatagttattccccaaatcctttctctctttccctccaagtcttcagtccaacacacttgtaatattatttatacttttcctctttaaccttaaattgaactaacattcattaaatacctattacctgtcagacgctgttacccaataccttcacattattgccagataattagggcaacaattcctgaggacataatgaagatatagttgcaatgagtctattccaatcactctagatgggagatcattacttatgtccatatttatgtttcatatattaatctacagggtacatttaaagtataaggatttatataaattttctagaataggattctattgcctgtgtttatgtctctatataaaatttaactcttaaaataggattcttcttgggggtatgtgtgaaagtggttaagaattgtttatttggcaaaagttggtggagatcaattttttgtttgtttcccaacacctgcattaacatccctgtgcacacacagtttttcttaagcaaattcaaataaggaaggagcaagataaaatcctagatttatctgtcacctgactatagtcactattgtactgtatatacagcaaatacattagttggctctaaatgttttctgatactgcacacttgttttcttaagatccacaaaacgctgaagagtgaaatatggcttttcatttgttgactcaacaaccagaaaactaattagggctggaggcacatgccatcatcaacttaaagccctgtcaaaccctgaaaggtctgaggcagtggtagctaaattgatgttaggtaatatgtgagttcttctttcttaggaaaaataagatctcaaaacatttcttggacatggaaattgcttagaacatatttaatgctttaagtgcaaatattgaaaatatgagcccttcaatttctgggaggagacagggtatctggctgggaccagagcggtggctctgctgacggtcagccatggtgtggggcaacgtccttcatgccactagattgccaggcagcaatgaactgtgattaaaatcaagagatcaagactcacattttcatttgaaaaaggttgaaaactcacttcagatatagaaatggtgctaaaatgtgaccatttctatgcccctcagatattctgtacccacagagtatttcccctccattctttcctacatcaggcagaagatggatgaactacctatggcaccagaagaggcagcagctgaaggcacagagcccttcaccccattcttccctgaacaggaaacctcaaaaacacttgtcatttgacagatttgatgtcacaaatgtcaatcattactaagtaatgattattgcattcctgaagttgctctagatgctacaaataatctcctactactggtataactgagaattgccaggcacttccttcttcatgtaggtatcttatgtttccaaattgtaccaaaaagtagttgttctgagatgtggaggcagccctccccacaagtgttttgctgcccagtacaaaaggtagttgtttttttccccaaaatctatgcatacttctctcatttcttatgccatttttttttttggccaggaaattatacaaccaaaggtcagtgttgcttacaaagataatgatagctgtcatctattgagcagctgttgtttcatttaaccattataaaaacactgtgaagcaaggaatgcttttcccattttgagacaaggaaatggaagttcagagaagtcaagcatcttgagcaaggctacgaagttaagtaagaaataagtccaggattccaagcccagtttgtttgaactcagagtctatgggctggatatgtattgtggggaaaaaaacaaacaaacctggaattagaaatgacaccaaattctgataagtaactcccccgtaccttgcctctccaggctaaacatctcaagttgctacaatccttctttctatgacatagttagggatgtcctcatcaccctggtcactgtcttttagacctacttgagtttgtcaaaggccctattcaggccagaacaaaacacagtgctccaactgcctctaaccagtgcaaaaaagaccagaacccctggcttctcttgggagggatactgctgagaaataaaggtcaagtttaaagcacagttctacatgtgtgatggttcccaatgcataatagtgcttatacctccatcactgcagccagctctggtgctaatgcttagaaccttgaccatgttcttctcatagggcatctgcattcaacacaactctgtggtctttctcgatagagtgatcactcagatgtgttttcctgcagcctccacccttgtgtggttcattgagggggacacaccagtcattcaaaggctctggcttacactgcctttgtctgctctgggctgtgcactttctgattatcttgcagcgtcacatattcacactgaagaggcaactattaaaattgaaatccaaaaggggcagagaagaatgaggcttatagtattcatcccatttctccagttctgcctttcttatttcgctttatccttagccttttgacttcaatatggtgttattttctattacaatgctccactctttctgtggtcattattatatttgtttctcccaaaccaaagatggaggtggaagaattaaatccctttgtcaaaagtgtagcagaggcactgtgtccataatatgcccatgttaatgcctctctttccataaagatccaacttgtaacctgctctccatagaacctcttctgatcaaccccagcccctggtaatttctccgtcttccagcttctgtgtgagatactgcaagatactggagggatctttgtctggaaaattacacctctgtcatactggattcttgcatgctacctttgtttgggttagtgctgacatttttagaaggctgggatcctctgaatcatcagtgcctggggcttcagtacagtcaccttcaaggttgtggcaacaacaaacgtcctcagccccgctgctgctagcagaaggtgtcttagcacaaacaggtgatgctttaaggtcatggataaagtctggtgagtgccagtaataaacaaaggagtggaaactgaaagggacaaacaattccagagacaagactttgggatcttatcacgatggaaaccctttgggaactgggaactggatcgatattctgggatcctgggatctctgtaaaaaaaaaacaaaaacaaaaacaaaacaaaaacccagaaaacaaagcaatatctgctttattggatttatctggtaatttatccagtaattgcccagtaacataactaataatataaattgatgattaaaaaaataaactgtaggctgggtgcggtggctcatgcctgtgatcccaacactttgggaggccgaggcgggcagatcacgaggtgaagagatggagaccatcctggtcaacaggtgaaaccctgtctctactaaaaataaaaaaattagctgggcgtggtggcgcgtgcctgtagtccccactactcgggaagctgagtcaggagaattgcttgaacccgcgaaggggaggttgcagtgagccaagatcgcgccactgcactctagcctagcaacagagcgagactccgtctcaaaaaataaaaaataaaaaataaaataaaataaactacattcttctttggatttttggattgcatatatggatatatggaataaccaagggttgtgaatatgaagagcaaccagagagaacctgtgctgaaactcacatggtttgtggatgtggacatcacaatgtgaaggaaagagctctgagacatgggtttcatctctagctcctttctatacttttcatgctggctctgagacctaaagcaggccactctctggttatgttttctcatctctaaaatgaaggaatgaaggtgttaaatttcataccatctaaaacatttccaactgtaaaattctcttcctaagctattctcattctagcaggaaataattttgttttcatttctacatatctttaattttagatgatctcatgcctagaaatggttccataaaaggataaagtactttaaatcactccctctctctctctcatctgttttttatatacatagaaaatgtctgttatcaatgatttctggggttgggaaagtgatttttacttctctctactgctgtactattagctttttttataatagtatacattacatttattaaaaatatgaaaatgaaaactatgcccttttactttctggatttccaagaataggacttatgaagtgaagttaaattaagctcatcaaagataaattaacttaaattgttattttgctcattgaattttggtaagtagcttttgataaaatgttggaaaatcatttaaagagatgaaacacactctcattgttccagcttctttgtgtagatgatagcaaggttttatacaaagtaatattcaatgaactgcgtgtatatgagcgattttggattttttccagtttcagttctctttcaatacatattgaaaacagcagaaacccaggaattctcatctaagttatgtgccaaaacaaatgatcaggttacacctgtttggcttacactaccttggaaaccactgggcttaaagcactagtttgctctcagggaaacaatataaccaactcatgcttttttaaatcaaatgagtaactgactggatctcttattaatctccacatctgtgtaaagaggtaagttaagcttatttctcttatgataggttttgtctatttaatgggaaaattgcatttcttgtagttttgtctatttaatgggaaaattgcatttcttgtagttttgtctatttaatgggaaaattgcatttcttgtaagtgggtagtcattactttttaaaaagttccagtaagagaagttatccaaattattgcaaacctcatcatactgccattcagttttgtgccgcatcacatgtgctctttctggataagctgccacgaagtaaggttgcctatgtggaatgtgtggttgactctagagctttcagagggtgtagccaagaaagaatgccaggcctgagcaaaaagtgtgagggctgatgtgaatgagcaggacgagggggaacagaggagcagtccaggatcttctagggacattttctgtgtggatggagggcaactttagcactgtttttaataggggattctctaaaaatgacaatgcttatacaggaaatttaaaaaccttgcaagtggtgtgtatgcacatgtgttggcctatgtgggtactgttctttctactcagtatttcatggattcctagtgtcgaagtgttttttatattatttttttaatatacaattatttacatgtatcaaacctaaaactacttgtagatttatggctcttatgcatctatatttacaaaataaaaattgaacattacaaaacgagtacaattaaaataattaaagtttaacagacaaaagacatcatgttgctgaaactaaatcactgctcattgagagaaccagctactgactatagaagcctgattctttgaagctaggctcacttgttctgtgggccaggtaatggcttgtttgtcgtctaccactcgtctccaatcaaactactagcaggcttcattcctgctgtacatctacccatcgtggcttcatttatttggctttctcttgagcatacccgttatgtgttgtttctcataggctaaaataattaaagttctggtacttggttccattatgattttaagtactatgtaaatgttttgtgcaaagggcgagatagtaaatattttaggttttgagggccatactgtctctgtcgcaactactccacactgcagttctagcatgaaagcagccatcgacaacagtaaacatttaggcgtggctgagtctcaaaaagtgttatttacaaaacaggtggtggactggattgggcctgagtgctgtgtagtttgcagaatgctcataaatatgagtgcagaaatgctgaaatcctctggcagtccttaaatatgagctggtcattcagcttttttgcttttctgtttgttttttaaaagcttaggaatatgaacgtacatataaacttcttgtagacacttaagaatataacaacaaaccctcagtgggccacagatcctgggtttgggaaacactgttttagggattttccaaataggccatcttcaaaaataaaaatgcctcattcagatggggaatgagagtttgctagtgtcagcaggcacaacaggactcagagatggaaagatgcccctgggaggaaatgcttttcttcaggggttagatgatttgtgtgcaaggcagaacagagttatgaatgtaccagagaatccagcactcaggggagagtagaaactagccaggcagaacttgggttcttctactgctggatttgctactgacttattgggagtgttggatgagtatcccacctctttgagtttttcagttcttccatcactaaaatgaaggttgtaccatacatcctgcttactactgaggatggaggtaagcattggatgagatgctgtgaaatgctgcataaatggtcaagtgcccaaggatgagcattttgttactaagaggtgaaaggagctgtgtatgaaggctgaaggatttttcagggagtgtcgctggcagtctgcaaggcaattggaaatccagtgctcctcgaacacaagtttcaaaccagcacttttggggaatgacgaagcagctctctggctcccagcagtgcaagggctttttggacagtatttatgcaggtagccttgcctgtcttcctcccagaggccagcttgacattgcctgaacctcgcaggaagttaaagcctccagtgttgggcaagaagttgctggtgtggcaaagctcatcctgcaataagagaagaacaagtgggctgctcaacaggggtttcaacagtgtcaccacagtcagaactggcactcatttccaaaagttcagaaagtcaggcacattgtttactcaatctattctaagggattcatccacatgagccaagcccagagacctgatctataaaatgcatctccaggaactggaactcttgtatctaatttcaggaggacttccttgcacagcataaacaatttcagcatgaaaaaaattattactcagaagcttgcttggtaaattggcgtaatgagaatcaattgttatgtgtagtatctgaaattcaaaatttcctgtgcattctacatttttgcttcatctggcaactctagttccttctcttaaagaacatgtggtctgtacagatattaatcacgaaaacaagtatatgattacaacttataagtggcatgagggaaaaaaagccaacataatgaacaagaataccaaggaagacctaatttagattagtggggtcagggaaagccactctgattcaggttaaggggaccagagtattgcaggaaggaggaacagaatggatgtagtgtctaaaggagaaactgaaggaaggaaagcatgtctggaatccagtatcctttggagatgtgcaagacaaggttggagatgcaggcatgggcaccactacacaggctattgttgtccagataagtgtttggccttttttcccctaccctcaatgcaacagaaaaccatggtagggcagagaaatgagaatatacagtctccattttaaaagttaatctgaatggataatgggttggagagggcaagaatgagaaacagagtgacagataggaagctattatggtgttccaggcaggagatgaaggtggcatggattagagtggtggaagcgcagatgaaaagagtgaaaagttttggtatgtatttcaaaggtaaaaactttggccttgaatgtagattggatgtggggtttgaggcaaagagaaggatgaagaatgacttccaagtttctggcttcaacacttgggcggatggtggtgcagtttactgaagcagagaacactgagaaggatcagtgctttggatggtgcttcataaagtgaagaaagtactggcaagatttcacttttgaatattttaagtttatgagatgacatcctattggagatgataagaaggcagctgaaagtcagagatgagaggtccacactggagatacataatttgggagtcattgacatatatgtagaggcaagaaagatttaaaaggattcactatatgattttccgacatggtaaccttccagatgtccgttaattggcttgctttgtaaacattattctataaacagctttctccaattgttacaagaaccaaatatatacatatgaaagagtgataggtctctgatttcatagtgtttattaggtttatttttttcagatttaattttgtatattcttattgtaaagaataagaatgccattgtctttccatcctttgaaaataggggccaggcacggtggctcatgcctgtaatcccagcacttcgggaggctgaggtgggcggatcgcaaggtcaggaattcgagaccagcctagtcaatatggtgaaactccgtctctactagaaatacaaaaattagccagccgtggtggtgggcacctgcaatcccagctacttgggaggctgaggcaggagaatcgcttgaacccgggaggcggaggttgtagtgagctgaaattgcaccactgcactctagcctgggcaacagagcaacactccatctgaaaaaaaatttttttaaaaaaataggatggacatttataaaataaaagtcataattatgacatttgatgccatcatcctctgattatattcaaagatcagtcactttttttttgttgcctttcttttagcaacacagtctcttaccttcctcctacctctaaaatgcccaacaaggtactttcaaatgtttagtaagattacataaatatcctcttgagtaatacagacaaacgcccaatgatacatgtcatagggaaacatattttttcctttttaatctttggggctttgttttaataattcataaagacattaacctttccggtaggcttaagaatcctttttatttaatacaattttgtttgtgttctgaaaaccaaggacattgaagtatttattccctgctgaatagggcattgtgtacatgtagctttgttttccctgaaaatacctcttagccttcatttgccttctcagggctctggaatgtgggcttgctctatattgcttcctctgtaagagaacatgtattatgctcccaacatgtgtgctgttggaacatctcagttttcttaactccccgtttccactcacaccaccatttccatgattctcttttggctgagtctatgcagaaaacaagaagtattaattattgtactataggaaacaggacctgaaaaggcaaagttttcacctgagaaattataaagtaaattcatggcaggcctggagctctagcccatatctacaggttatggtagaaagttaaagcagtggctctcaactgggaagattttgtcttctctctccaggggacatttgaaaatatatggagacattttttgttgtcacaaatggtaggggacagggttggctactggtttctagctgctaggagccagagatgctactaaacttcctacaatgcacaggacagctgctgaaacaaagaattaatcagcccaaaatgtgtatggtgcaagtgttgagaaaccttgctgtcagttaatggaaattagacttgagccctgctctgcatcttactttgtgaccttgagaaagtgtcttcatttctgagtctgccttttcatttgcaagaataaaaccaccaccatcataaggcaaacaaagacaaaacaaaaacaaaaacaaaaaccacctttcagagtggttttgagagatcaactcaaaagcacagaacagagttctgagcatatcatggacccaacaaacaatgaatcaggcccatcccacgaagttcaatgataagatggaagcagtcagtgccagaaagaaaatgtcaccgaaatgaaaaagaaggctcttcagattcttattagcttttattgagaaaagagcaagagatgcgaagaagtttaagagaattaaatagcatcgtggatgtactagaaggggagggaaggagataatgagactggaaatagaacctaatgagagttgtaggagtgacagagatttcagcagtgacctggagatggatttgagatgcatttaggaggaatctgaagaactttgtgggcaattaaaaaggtcatgagagaggagtctaggatgaatatgagatttctgacaggcgcttgggtgttggtgatgccattcaataagaatgaagttgaagggcaaggaaaagaataaattcagttgtagatgtatcaagttcagaattcttgtgggacatttagatgatcatcatgaggcagggagctgtgtaggtttagggagagtcaggaaggtgaaagcagaagtcgaatccatggggatgagtgagattttctagggagagcataaagagtaagaaaagagcaaaggacagaattcttaagaggtggacaacaaaaacgaagatgaaagaatcaggaggcgtgaaacaagaagagagggtagagtggtatagaactcaagtctgaagaagtttcaggaatgcaagcacaggcaacagtgtcaaatgtcacaggaaaattacataaaatccaagtgtccagaagatttggcagttgcatgacagtgctaactttagcataaacgttaagtacaatgatgagcagaaaaactagactcaatgagttgaggagtaaataacagttgaggaagtagaaatgaggaataaaggaagaaagactgtcaacaagataagctatgaagattctccctctcccccactaaaaatggacaacacttaagcatatttgtatactgagagaaaggagacgggagattgaagaccacagaatacaaaacacagaaaactgatagatcaagaatgggatatagagcgtgaatgattattttggggtaagaagagggagactctctttccaaactgggtaaagaaggtaaatttggtatgaatatgtcagtctggagggtgaaggagcagagtttaaggaaatttgtattggggagcttcacttttcattatcaaattggtggcaagctgagctgctgatatgggatatgggaaccaagaagaagcaggggcaggtaataaaccttaaggactgggaagggcattaacgaattagagaaagtgagtagagactatagcgtcaacaatctggtatgtgaaggacatctcaagataccaggatcaccttgatattcatgtctaattctcttcatatcagtaacatgacccatccatctttagagggaagcaataaactagaaagattttgccaaccacagaattgtttgaaaatggggtagtgggcggtggggtagatgaccaaccaaatctcaaattaaagtggacatgggattaattatgtccatgggccagttgtatcatctccttgtatgtaagacagcatatccttcgggattcttagagagccctaaaccaccagagttgttataatgcagaaattgtaatttatcttacataatccctcaaatagtagaaacgatctgtagaatagaaataaatggatcctgatgaaattgtcttattttgcagagtcttgccttcttttgagcctaagtcatgagttggatgttcctcagagatctcctgagtggagtaaataaatactccactgggactggatggatttggctggctgtcgtgtttgtcttccgtttgctggtctacatggtggcagcagagcacgtgtggaaagatgagcagaaagagtttgagtgcaacagtagacagcccggttgcaaaaatgtgtgttttgatgacttcttccccatttcccaagtcagactttgggccttacaactgataatggtctccacaccttcacttctggtggttttacatgtagcctatcatgagggtagagagaaaaggcacagaaagaaactctatgtcagcccaggtacaatggatgggggcctatggtacgcttatcttatcagcctcattgttaaaactggttttgaaattggcttccttgttttattttataagctatatgatggctttagtgttccctaccttataaagtgtgatttgaagccttgtcccaacactgtggactgcttcatctccaaacccactgagaagacgatcttcatcctcttcttggtcatcacctcatgcttgtgtattgtgttgaatttcattgaactgagttttttggttctcaagtgctttattaagtgctgtctccaaaaatatttaaaaaaacctcaagtcctcagtgtgtgagtgccacagcctcagatatgttgaatgtggtaggagagggacccctcccctactccagaatcttcacacttggccataaacacactccctctacctgaagcaaagctactctgtgacacacaagagggttaaacaaagaaaacctgcatccctcctcagcaaggcctaagctgagttggaagacaaagcacatcagccttagtatcatttgggaggaatttttttacattgtcaatatgctttcagttatgagctctagacagaggtctcattgttttgttgtagggttctccagtatgtggataacattagttgttttagaataggtaattgcaaattagtctgaagaaatctaacaggattcttttaagagcttagatttttcagggaaaaaaaaaaaaaaagaaaccctgtgtcagttttctgttttttctaactatctcattacaattggtgcacaatgaactggaaaatataaaaagtgacactttaggcaaatgtgatggcctccgagctgaaatgaaggaactggcaatctttccaaagtggcagccaaggccccactccctgtcctactcaatctctgcagggaaaaactgtgggataggatagcagccagctggggacacacagaggaacattcaacaggaaggtcccgcctagggaaaaggccacagagcccaggcctcttgccgattcagggatccttggatataagtggattagaggagagggaggaaagctatcatttcagtggtctccaaatcaagtagaaatattactgggaggtatcccacttaagcctgaaccagcagacatccgaaagggtcactctagagtcagaaaggaaagcaggtcccccagaaggcaacacattgataggaagtggaggccacagaaaaagaatgtgcccacttgataattacttaagacttctatttaaccaaaagaacattgaaatactttgtaaatattcatattgttgaacctttcataatcaggaattcactatgtactatactgtaagtcatagttcgcctataatttactagtatatctccctctaggacagatagtaaaatgtgtactatgttgttacagtggtgcaaaaatgttttaaaagtttatcacttgttttgaagactagaactttctttacttttctatattttcttagcaattcacagatatgttctctttggatttagtactttaacatatgtacatttcttcagaataaaaataagggtatttcacaatg

SEQ ID NO: 36 - DNA, 37261 bp, Homo sapiens
gccatgtgaaaagagaagctcaaagtaagcagcttttgactttttagggaggccagaaatctggattttaatattttggtaactaattcatatttttggaaaacatactggccacacaaaactggtcagtgcattagatgcctagccttcaagatttccactctggggctaccccttagggcttggctttgggtgggggagtttgacttgcagcaagtaacctcacttgttagcgcttaatttcccctctggtcaaaagggcaaaataataaaagcctgtccatcggcattctgatgctcagatgagatcattccagaggtcgcccatctctttactgagccttcctttattacccaaagtcttactctacttaaagcatttggagaattttcggtttcctactgggcattttaaaactggggattcctatgcatgaaaatttttcccaagtcctctgaatgggatcctgctgggatgcaaagagttaagaggaaatagcctattagggtcttgctaatccgagaagttcaggacctgaaaagtatctagagcactgctaagagccccgactctagctagatccacgcagggcccgccagatcctcgaggaattgtagagcagaacctgggaggagacattagcatcccgtgctacaatggaccaaggcctcggcggagcgcgcagaagacaactctgggcccgctaaaccaacccaggatacccaggtaaggcgagaacccacggcgccgttagcggcccgctcaaactgaggcgcggctggcgggggactctcgcccgaaaatcagcttggaagaatgaactgtccggagcgaagtctgcgcccacccggggtccagactccacgcgggtgactcccacgcgcgccgcgcctccgccgcgtcccggactatccgagagagcggcgaggactcgaccgcggaaagttggcgctcgcgtcgcttcccgcgcgttctggggcgcccccctcccactcgagcgccacgtgccgcgcgccccccgctcccgggccgcggcgggacgcccccgcccccaccgcagcgcgcagtgcgcaggcgccttcccgcgggtcgcggcggcgggagcgggaggcggcggcggcggcggcagcggcgggagcggcttctgcctcggctggagactgaggcgaaggcggcagcggcggaggaggtggaggagaggcgagggtgaaggcgatggcgacgcggggcacatgaggccgcgaccggcgggacgggccgaggcccggcggaggaggcggctccgggggaacccgccgccgggtgaggggcggccgcagggccggctgaggagaagcgggccaggggcggggtcccagggggaggcgggagaactcttggggagcccggggaggggccgaggagaacctccggaggtccggggaggagcgcggccagagcgggagaaggaggggggcgccgccgaggggttcccgccgagtccggaggggcgtcgccggcccgcgtcctgccactgtccccggcgcaccctccctctttgtccccaggcgcgcggctcccaaatcgggagggaaacggctcgggggtgtcctgggccgcggaggtgtcgggcgacggtcggggagcccggacagaagcggcgcgcactcggcggcgccccggcggtgccgacaactacccgggcggttaggggcgcagggcggagccgggccgcccctcgccgcccgggctcttcgcgggctgctctttgtctccccgacctcgatccctgcgtctccggcggcgtgcgggctcgtctgaggcttcccgcatctccccgctggaactcctgcctcccgggggttagaggagggttcgttcgagggctggaagcgggaaagcggggcggaaggactgggctcatcgcctcctgattaactcgttgtctttacttaaaatgacttttcccccactttgtcaaacttgagaactgttttgtgtgtgtgtgtgtttccttaagtctctagcttcaaaattaagagtaggcgctaccgctgtgattgtgggcagttgtgtggttggcggctgcgtttggagctctgagttgaaaagatgtacgtgaatgtatggtttagattttgttcttttttttgcgattgtctgattgggagtacttttcctttgcgaaatgggcgaatttggttttctttttgttcattgagaactggcagtgataccgatttcattatgctcatgcttaattttgttagcatcaagacgatgtgaaatcgagtaagttaagtttgaataagttcaggctgagggtcatcttgtatgcctgataagtctaaatttgttatatgtttgtgtcgtgtatacgttcaagtgaatatatgtgaaagcgctataaaaaatcaaactacataaatgaaagggattttaatttcctgataagcaggaaacagcatatctccagtactttaatatctgtagaaaaatgcgttaataatgtcatttaggaataaaatatttctctccctagagagggtttaggtattattcagagtaaaagagcaaaaaaatttcaacctcagagggtatggaaaaaaacagaaaaatacccttacttccagagctcctgattaaaatattgtgagttgtgggttaagtttactgatttaaaaaaaacttagcatagagttgtatcactgcagttgctttgaatgtcttaagtactgtgtaatgtcagaattaaacacgaactaacttttctgggtagaaggtaaaaagctccaataaacagatcttagttttccccagatttttgtgcccagagtgctgtaggcaaagggcatattgaagagatacatagaagttgtatggaaggtctgttaatatttgtcctgatttgtaatggcttaatattatttactacttaaactgttgtgcatttttccaaagcatttcaaacaacctcttcaaaagccagcacttttaacttttgaggttgtgtgacttaagaattgttttctaccagaaacagttctcttaaaaagttctaccacagttctcttaaaaaggagcaaaggacctggtaattttctctgtaatcaattcatgcaggtaaaattgagttttagcctttaatccagaggacttaattaacatatctccagcataacaatcttacttataaatgctgttatcctttgtcaattaaattttattcttatatttgtataagtcagccaaagggaaggaatgcagggttgtgtttctgattagtccacttccccccaggtccaggcttgcctatcaattgagtaatgaggatcttagaatacaggatatataatttaaatccagagcatcgttctcttaacaaatgcttagtgtttgttccatgcctaattcaatgcaaagtgatgagttccaaaaaatattgctttatttgttgtatgttcacatttcaaaattggtgaggtgtgttcttttttctttttccttttccttttttttttgagatggagtcttgctctgtcgcccaggctagagtgcagtggctgggactacaggtacccgccaccacgcctggctaatttttttttgtagttttagcagagatggggtttcaccatgttagccatgatggtcccgatctcctgaccttgtgatcctcccgcctcggcctcccagagtgctgggattacaggcgtgagccaccgtgcccggccatccttttttttttcaaagacattgctatgatgcccaggctgtcatagtacactgcagcctcaaattcctgggctcaagccatcctcctgcctcagcctcctgagtatacccagctaatttcttttttctcctcctttcctgtcctgtcctgtccttccttcctatagttaagtttgactagggggtatgattacttatttctgaacttatgcttttcttgtagtgtagaaatacatgtggcttctgttcaaaatatttgataaaaatttaggcaaagaaaaagcaggaattttttttttttgtttgtttgtttttgagacggagtttagctcttattgcccaggctggagtgcaatggtgctatcttgtctcactgcaacggtgctatcttgtctcactgcaacctccgcctcccgagttcaagtgattctcatgcctcagcctcccaagtagctgggattacaggaatgccccaccatgcccagctaattttgtattttttagtagagacggggtttcaccatgttggtcaggctggtctccaactcttgacattaggtgatccgcctgcctctgccttccagagtgctgggattacaggtgtgagccaccgcactcgaccagattattagttttgtaagaccgttcctttgagaataggtatgagaagatagattttggctgatatcgttaacctgaaatttagacatagaaaacagttctgagctgttaatatcagctgaatggcaacagttgtttttcaacatactgctacagctgatgagttcagtttgtgttgaaataagaacctagtaaaatgtatttttaaaaatattttttaagatttaaatacaaataattttaaatacaaaaaactagctgggcgtttgagcattgctatttactgcaactctaaagagtgaatgacctgttagtcagtactggctggcatacagttatacattcttgaattttacaagtactgtagttggctgagagcagtccttggcaataaaggtttatctttcagacctgtggaatatattgcccaaagagttttcctaaaacaaggatatgatgatctctttgcagatagcattttactttttttttttttttttagacggagtctcgctccattgcccaggctggagtgcagtggcgtgatctctgctcaccacaagctccacctcccgagttcatgccattctcctgcctcagcctcctgtgtagctgggactacaggcgtccaccaccatgcccggctaattttttgtatttttagtagagactgtttcatcgtgttaaccaggatggtctcgatctcctgatctcatgatccggccacctcggcctcccaaaatgctggggttacagtcgtgagccaccgtgcccggccagcattttacttctaaagaaatgaaatggggccaggagtggtggctgatgcttataatcccagcactttgggaggccaaggcgggtggatcacctgaggtcaggagttcaagaccagcctagccaacatggtgaaatcccatttctactaaaagtacaaaaaattacctgggcgtggtggcagtcatctgtaatcccagctactcgggaggctgaggcaggcaaatggcttgaacctgggaggtggaggttgcagttagccgagatcgcatcactgctctccagcctgggcgacagagcgagactctgtctcaaaataaaaagaaagaaatgaagtattctggtaaatgaattcttctccagctctcagttgaagctttgttctttgaggctataatgcttgtaatacaagcacaatttggacaaaagcattctggtgcccattaagtcattcaactttttttttttttttcttttgagactgagtctcactctttcacccagggtggagtgcagtggcacgatcttggctcactgcaacctccgtctcccaggttcaaggaattctcttgcctcagccttgcgagaagctgggattataggtgtccaccaccacgcccagctaatttttgtatttttagtagagaaagggtttcaccatgttggctaggctggtctcgaactcctgacctcaggttgcctcagcctctcaaagtgctgggattacagacgcgaaccactgtgtctggccctttttatttttttgagacggagttttgctcttgttgcctaggctggagtgcagtcgcgcaatctcggctcaccgcaacctctgccccctgggcaagattctcttgcctcagcctcccaagtagctgggattacaggcatgcaccaccatgcccagctaattttgtattggtagagacagggtttctccatgttggtcaggctggtctcctgacctcaggtgatccacctgcctcggtctcccaaagtgctgggattacaggcatgagccactgcgcccagcctttttttttttttttttttttttttttttgtaattgagacagagtcttgttctgtagcccaggctaaagtgtagtggtgctctcaagcgatccttccaccacagcatccctagtagctgggaccacaggcccacaccgccaccacgcccagttaattttaaaattttttttggaagagacagggtcttgttttgttgcccaggctggtcttgaactcctgggctcaagcagtcctcttggcctctcaaatatggggattacaggccaaggcacctggatcccaacgttttttttttttttttcttccccaaaacatataagcacttgattaaaaaaaaaaaatagttggactctttctttcccccccttctcactattgcacttgactaatttttttttttttttttttaagacagtcttgttctgtcatccaggctggagttgcagtggtgcgatctcggctcgctgcaacctctgcctcccaggttcaagcaattctcctgcctcagcctcccaagtaattgggactactggcgcatgctgccacgcctggctaatttgactgattttattttatttattttatttttgagacagagcctcactgtgtcacccagtctggagtgcagtggcacacatgtactcccagcactttcggaggctgaggctagaggataccttgagcccaggagtttgagaccaccctgggcaacatagtgagggccctgtctctgcaaaaagtaatttgaaaattagctggatgtggtggcatacacctgtggtttcagctactcaggaggatgaggcaggaggattttttgagcccagaagttgaaggctacagtgagttgtgatcacaccatgcactccaccctggtcaacagagtgggacagtctctatttgaaaaaagaggccgggtgcggtggctcacacctgtaatcccagcactttggtaggccgaggcaggcaggtcacaaggtcaggagttcgagaccatcctggccaacatggtgaaaccctatctctactaaaatacaaaaaattagccgggcatggtggcgcgcgcctgtaatcccaactactctggaggctgaggcaggggaatcgcttgaacccgggaggtggaggttgcagtgagctgagattgtgccgctgcactccagcctggcaacagagcaagactccatctcaaaaaacgaaaagagggccaggcacagtgactcacgccttgtaatcccatcactttgggaggccgaggtgggcaggtcatgagatcaggagatcgagaccatcctggctaacaccgtgaaaccccgtctctactaaaaatacaaaaaattagccaggtgtggtggcacacgccagtagtcccagctacttaggaggctgcggcaggagaatcgcttgaacctgggaggcagaggttgcagtgagctaagattgtgccactgcactccaggctaggcgacagaacaagactccatctcaaaaaaaaaaaaaggaaaggaaagaaaggccaggcatggtgcctcacaccagtaatcacagctcttctggaggtcatggcaggaggattgcttgagtccaggagttcaagaccaacctgggcaatatgatgagaccctgtctctacaaaaataagaaattttaaaaaaaaggaggaaagaggctaggtacggtggctcacgcctgtaatctcagcactttgggaggccgaggcggggggatcatgaggtcaagagatcaagaccatcctggccaacatggtgaaaccccgtctctactaaaaatacaaaaattagctgggcctggtggcacacacctgtagtcccagctacttgcgagactgagacaggagaatcacttgaacccgggaggcggagtttgcagtgagctgagatcacaccactgcactgaagcctggtgacagagcaacactccgtcttaaaaaaaaaaaaaaaaaaaaaacaggaaagaaatgcatagggtttcagagtaagttttgatgtttttcctctatataaatcggataaacttcacacacccctattcttatcctctaatctctaaactatattcaactcccaatagttatagagattattttcattcacatgtttgtagtatttatcagttttggcttaatttattattacttaactaatgagttataacattccttttgggaacgttcaaattagagctggactctattttaggaattccccttgagtcattcttggacttggaattcctaattgcccatccagagtagatgtttatttggattcaaaattttccttcctgaaattatccattctgtggcttcggttaccatatatattttgaatactgccacatttttatctgtagccagacctctttttttatcctggctgcctgttcaacatctccacagagatactcagaggaggtaatttgaattgtgttgtccaaagtgagctcttcatcttggccccacacctagactttcttcagtgtactctattttattaagtggctctatcacacaatttactgaggctggactctttttttttttttttttttttgagatggagtttcgctcttgttgctcaggcgggagtgcaatggcatgatcttggttcactgcaacctctgcctcccggtttcaggcgattctcctgcctcagcctcccgagtagctgagattacaggcgcctgccaccacgcccagctaattttttatatttttagtagagatagggtttcaccatgttggccaggttggtctcgaactcctgacctcaggtgatccacccgcctcggcctcccaaagtgctgggattataggcatgagccaacacaccctaattttagaatattttagattgtttttattccgtcaaaaagaaacctgatacccgttagcagttactccctccttattccccccataatggttgtacaatattccattatggaggttataccataaattatatatgtttcttttttttttttttttttttttttttgagacggagtctcgatctgtctcccaggctggagtgcagtggcacgatcttggctcactgcaagctccgcctcccaggttcacaccattctcctgcctcagcctcccaagtagctgggactacaggcgcccgccaccatgcccggctaattttttgtatttttagcagagacaggatttcacagtgttagccaggatggtcttgatctcctgaccttgtgatccacctgcctcggcctcccaaagtgctaggattacaggtgttagccaccgcacccaacctaattatatgtgtttcttataataaatgccctgtatttgtttagggtaaattactaaatgtggaattattgatcaaaggatataagcactttaaagttcttgataactgttgccaagatgccttccagaaaagttgtaccagatgacaccattggtgtatgatggtatgggtgttggtgtttttttgttgttttttttttttttttttttttttttttgagacggagtttccctcttgttgcccaggctggagtgcaatggcgcgatcttggctcactgcagcctccacctcccaagttcaagtgattctcctgcatcagcctcccaagtagctgagattacaggcgtgtgccaccacgcccgctaattttgtatttttagtagagacaggatttcgccaatattggtcaggctggtctcgaactcctgacctcaggtgatccgcctgcctcagcctcccaaagtgctgggattacaggcatgagccaccgcacccagccgatggtatgggttgggtttttttaaagaaattttgtatcataaacgtagtcatattggaaaatcatacatttatttttgtcttagacatgttcgtttttctagactgagcattgttcagaacagttggtttgacctaatcttaggctgttttggacaaatgttccaatattgtcctgtttgcatgaagacagttccacttaggatatgttgtgaatgaatatattatccctatcccaggttcctcatacttctccagctggttcctgaaggttcttacattcaaatagaatggctttttgccagcgaaaattggcacttcaacccacaatggtgctttttgtttcctcattggttgatacagccaagatctcaaactactcactctccatgagattttataatttgattcgccacaaattatattttaggtttttcaaatattcatagccaagagctcttttgaaaacaagttgttttcatgtttgtagcacatagattactatgtgctacttagctgctgtaatgcttttgcttagaaattgtcacgagctagttattaaacatctattatcactcatgtggaattaacttccacttaaaacgttccagttaaacaacacttcattgtaaaccctttaattgattcctggtctctgcacataaagcagtcgcgttcaggggtatgagtcactagcacgattcttagtggattgctcagctcatgagctgggatgcctagattgttaatacctactttggaattacagtgagtcaatattgaaatttttaaatttagtccaaccgcaaattttctgaaatgatcgtttgggaagtgcctttttaaaattttgacatcttgttatattgtttaattttactgctattactttacttttctcctatccctagacttttgagttccacataatttgtcagtttggtgaattttactctgagatagttttcatcaaatgttaaatggaagagattttagaaatcatctaacttgatattcttcatttatttcagaaattaggatatggaaagaacttattcctgaagtgcatggattatattctgggattagaatctcttgccttctagtccattgcttgcttagtttcacaaaattcaaggttaagaatcacttttcgcccaggagccgtggctcacgcctgtaatcccagcactttgggaggctgaggcagacggataacctgaggtcaggagtttgagaccagcctggccaacaaagtgaaaccctgtttctactaaaaatgtaaaaaaattagccactgtggaaaacaagataatgttcctcaaccaattaaaaattaccatatgatagagcaattccacttctggatattaaaacaaaagaactgaatgattagccaggtgtggtggcacacgcctgtaatcctggctacttgggaggctgaggcaggagaatcacttgaacctgggaggcagaggttgcattgagccgagatcatgccactgcactacagcctgggtgacgaggcaagattctgcctcaaaaaaaagaattgaatgatttgtacacccacgttcataacagcattattcacagtggccaaagttgtagacaacccaggtgtctgtcaacagatgaatggataaaaaaaacgtggtatgtacatactatggaatatattattcagccttaaaaaggaaggaaattctttttatttatttatttatttatttatttatttatttatttatttatttttgagacggagtctcgctctgtcgcccaggctggagtgcagtggcgtgatctcggctcactgcaagctctgcctcctgggttcacgctgttctcctgcctcagcctcctgagtagctgggactacaggcgcctgccaccacacccgactaattttttgtatttttagtagagagggggtttcacagtgttagccaggatggtctcgatctcctgacctcatgatctacccgcctcggcctcccaaagtgctgggattacaggcgtgagccaccgcgcctggccaaaggaaggaaattctgacacatggtataacgtggataaaccttgaacacattatgctgagtgaaataagccagacacaaaaagacaaatatataattccatttatatgagataattaggtagtcacaaccatagagaaagtagaatggtgattgccaggggctgggagaaggggaaatggggagttactgtttctgggtctagagtttcagttttacaagatgaaaaaaattctggaggtagtggtgatggttgataatgctatgaatgtgtttaatacttgaactgtacacttaagatagtacattttatgtctattctaccacagtaaaataataaaaataatttaacaggacacaagttaatgaggggggtttttagtgcttgatttgaaaaacttgagaggttttgttttttgttttctttttttaaatagagacggggtctcgccatgttgtctaggatggtcttgaactcctgagctgaagtgttctgcccatctcagcctcccaaagtgctggtattacaggagtcagccaccacgcccagccagcttcttcccgccccacacccccagatggagttttgctcttttgctctcttgcccaggctggagtgcagtggtacaatctcggctcactgcaacctctgccttccgggttgaagcaattctcctgcctcagcctcctgagtagctgggattacagtagcccaggcctggctaatttttgtatttttagtagagactgggtttcaccatgttggccaggctggtcttgaactgaccttgggatccgcccgcctcagcctcccaaagtgctaggattacagatgtgagccaccatgcctggcctttttttttttttttaacatgagactattagagacttttccaaagatatatgtggaagtgatttcttgggttaatagttgttttgtggtctccctattctcaatgcccaaataaattgtcctccttaaataaataaatcatttttgtcaaagataccgtttattccttcctccccagctaccaagaaagcttgttctgttttattttacttttaaactttcattccattttacattttaagatcttaaactctgaaatgtattttctttctggtgtttgtgcatttttttgtttgtttgtttgtttttttgagacagagtttcgctcttgtcgcccaggctggagtgcaatggcgcaatctcagctcactgcaacctctgcctcctgggttcaagtgattctccagtctcagcctcccgagtagctgggattacaggtgcccaccaccacgcctggctaatttttctatttttagtagagatggggtttcaccatggtggccaggctggtctcaaactcctgattttagctgatccgcccacctcggcctcccaaagtgctgggattacaggcatgagccaccgcgcctggccttgtgctttttcttttgttgttctgatcctgaagattgggattagggtcacatagaacctgtacataattccattggtaatgtaattctttactagcgagtggtcaagaaagagcccaaactccagtgcaagactgcctgacttcaaattctggctttgctacttaataagtagatgattttaggcaaataataaagttttttggtttttgggtttttttgagatggagtttcactcttgttgcccaggctggagtgcaatggcacaatctcagctcaccacaacctccccctcctgagttcaagcgattctcctgcctcagcctcctgagtaactaggattacaggcatgcaccatcacgcctggctaatattgtatttttagtagagacagggtttctccatcttggtcaggctggtctcgaactcctgacttcaggtgatccgcccgcctcagcctcccaaagtgctgggattacaggcatgagccaccgtgcctggccttgtgcttttcttttgcagttctgatcctaaagactgggattagggtcacatagaacctgtacataattccatctgtaatgtaattctttactagcgagtggtcaagaaagagtccaaactctagtgcaagactgcctgacttcaaattctggcttcactacttaataagtagatgattttaggcaaataataaagttatttgttttttgtgggttttttttgagacagacttttgctcttgttgcccaggctggagtgcaatggcacgatctcagctcactgcaaccaccgcctcctgggttcaagcaattctgtctcagcctcctgagtagctgggattacaggcatgcaccaccacgcctggctaattttgtatttttagtagaggcaggtttctccatcttggtcaggctggtctcgaactcctgacttcaggtgatccgcccgccttggcctcccaaagtgctgggattacagacgtgaaccactgcgcctggcaggcaaattataaatttttaaacctgatttcctcatctttaaaatgagtttaatattagaatctacctgctgaaataattcaaataatgttcattacatttgatcttcaaaaatcctattaattcggctgggcgcggtagctcacacctgtaatcccagcacgttgggaggccgaggcagagggatcagttaagtcaggagttcgagaccagcctggataacaaggtgaaacctcatctctactaaaaatagaaaaattagccaggcctggtggcgagtgcctgtaatcccagctactcgagaagctgactgaggcaggagaattgcttgaaccccggaggcagaggttgcagtgagctgagacttcgccattgcactccagcctgggcgacagagcgacactctgtctcagaaaaccaaaaacaaaacaaaacaaactgaattatgttttacagaaaaacagtgttaatttgagtctgtttggatataacctatagaaaactcttgagataagaatttgagagagaattacataatttattaccatgttgatgccagctaatttttttaaattctgttttctagtgtaagacaaggtagatttgtgtctaagttatttggaaaatagactaaaaatagcacatttggtttctgtctaataaatgttatataagcaaacttgattttcttcagtatttgggttttctttgtgtgagtgaatccttttgaattatgggctaccatgaattgcagtatcttttaaaatagaagccgttctagaaaaaagcaacttttttttttttttttttttttttttgagacggagtgtcgctctgtcacccaggctggagtgcagtggcacgatctcggctcactgcaagctccgcctcccgggttcacaccattctcctgcctcagcctcccgagtagctgggattacaggcacccgccaccacgtctggctaattttttgtatttttagtagagatggggtttcaccttgttagccaggatggtctcgatctcctgacctcatgatccgcccacctcggcctcccaaaatgctgggattacagtcgtgagccaccgcgccccaagtttttcaaccttttaattttttaaagaattgatacgattctataaaaataataaaatttgaaggaagtcagtaaaataaactgagatgtttatattaaatgtcaattaatcaatgtctatactatatcaagattaccttttatagacaaataggtaaaaggatggaaataacccacaaaggggttggatatatgagggggaacgtatcctactgtcttagaaacatgaaaattgacatgattttgaaatgccattttgcatctagtaaaggagcataatgacagtgctgaagaggtggaggtgaagttgttttaagtatacattcattgccaggcactgtaaattactagtgccttttttgaaaaccaaatgacagtacaaagcaaaaaccatgcagatttacattgcctgtgatctaataataccacctcctagaatttatagatataaactcaaggcatttaggatatattcacgaagatattaagtataaaagtacatataaatcagttggaccccagctattcaggaggctgaggtgggagaatcacttgaacccaagagatggaggttgcagtgagctgagatcatgccactgcactccagcctgggtgacagcaagacccagcctcaaaaaaataataaaaaattggtgctttactaattagcaaaagacattgaggtatttggcctccacccatctccaccacttgacatgtgcttccatgtcattttctatttgtagatggagtatagacatgattttttattcatgagagccattcacagctgaatctcagactttcagcccctacactataaccaagtttgttttcagaagcagggaagccagagaagacttatgtcctgaaattttttttttttttcctaagactgagtcttgctctttcacccatgcttgagtgaagtggtgccttctcgtctcactgcaacctccgccccccgggttcaagtggttctcctgcctcagcctccaagtagctgggattacaggcgcatgccaccacgcccagctaatttttgtatttttagtagagatggggtttcgccatgttggccaggctggtcttgaactcctgaccttaggtgatccacctgccttggcctcccaaagtgctaggattacaggcgtgagccatcgctccggccctatgtcctgaattttaggcaccttttcaggtcccttatgtagaccatttcctcacatgtgcactgatcagttctgaagactgaggggcccctctgcagatctccagggttttttgtgtgtgagtgagtgaatccttttgaattatgtgcttccgtgaattgcagcattctttaaaaaaaaatttaagaagccattcaagaaaaaatagataaaatgttcagggctgggtgtggtggctcacgcctgtaatcccagcactttgggaggctgaggtgggtggatcacgaggtcaggagatcaagaccatcctggctaacatggtgaaaccccatctctactaaaaatgaaaaaaattagccgggcgtggtggcgggcacctgtagtcccagcttctcgggaggctgaggcgggagaatggcatgaacctgggaggtggagcttgtagtgagccaagatcaggccactgcactccagcctgggcgacggagcaagactctgtctcaaaaaataataataatggttcaggggaaaggaaacttcagtggagcaagaacccacttttctccacagtgagaccacaattggcagtgacatattctgcttagaaatgttaattccagaacctgccttctactcattctacttcttgaaatgatcttaatttctctggaggagtattgtactctgtaacattgtaagccaatccttaatgctttgttaatacatagctgccagggagggggcttgcctagagaatgagtgacccattacagaaatgaggactaatgttttcaaaatgttccccagactgcactcatctcccaggaattatttgacatttcactgagagtaagaatgggtaacttgtggccgggcgtggtgactcacgcctgtaatcttagcactttgggaggccgaggtgagcagatcacctgaggtcaggtgttggagaccagcctggccaacatggtgaaacgctgtctctcctaaaaatacaaaaattagttgggcgtggtggtgtgtgcctgtagtcccagctactcaggatgctaaggcaggagaattgcttgaacccgggagatggaggctgcagtaagttgagatcgtggtactgcactccagcctgggcgacagagagagactcttgtctcaaaaaaaaaaaaaaaaaaaaaaaaagtaacttggaaggagaggaaagggaagagtatccaagaaaaacttactgactcaataggtaaaaacattggtgatactgccattcattttaggaaactcatggttctttattttagaaagaagattgcagctgggtgcggtggctcacacctgtaatcccagcatttgggaagccgaagggtgaatctcctgaggtcaggagttcgagaccagactggccaacggggcgaaaccccatctctactaaaaattagttggacgtggtggtgtgcgcctgtagtccagctactcgggaggctaaggcaggagaattgcttggacccaggagacggaggctacagtcagctgagattgcggtactgtgctccagcctgggtgacagagactcttgtctcaaagaaaaaaaagagaaagggaggaaaggagaaggaaggaaggttagttgctcgtcacccattttgtgagatgttggagttaagttgataaacacatttacacaaaaagaaatgcaaatagtaaacaagtataagagaagtttggccgggcgtggtggctcacgtctgtaatcccagcactttgggaggccgaggtgggcagaacatgaggtcaggagatggagaccatcccggttaatgtggtgaaaccctgtctctactaaaaatacaaaaaattagccgggcatggtggcacgggcctgtagtcccagctattcgggaggctgaggcaggagaatcgcttgaacccgggaggtggaggttgcagagagccgagattgtgccactgcactccagcctgggcgacagtgagactctgtctcaattaaaaaaaaaaaagttcatttttactactagatcccttagtaaattagtgttatttggaaagagtattcatttagataaagactagaaggacataaggaaaaccaaaacatttgtaagtagctgtgattatgggtttttttgtgtgtgtttgtttgttttaacccatttatgcctgagattgcaattttttgaatttgaaaaaatcagaccttggcaatgatcttgaacagtaggatataaataactcccacatgcgtagcgttccagtaatggaacaataggcataaatgggttttaatgttatgggttttttgttttgttttgttttgatttgatttttgagacagagtcttgctctgttgccaggctggagtacagtggcgcaatctcgactcactgcagcctctgcctccctggttcaagccattctcctgcctcagcctcagcttgtagtcctgagtagctgggactacaagcgtgtaccaccacacccggctaatttttttgtgtttttagtaggggcgggtttcatcatgttggccaggatggtctcaatctcctgacctcgtgatccatccgccttgggctcccaaagtgctggcattacaggcatgagccactgctcccagctgggtttttttgttttttgttttttgttttttttttttagagttttgttcttgcccaggccggagtgcaatgggacgatctcggctcactgcaacctctgcctcccagatttaagccattctcctgcctcagcctcccaagtagctgggattatgggcacgtgccaccatgcccggctaattttgtatttttagtagagacggggtttcaccatgttagctaggccagtctcgaactcccgacctcaggtgatccacttgtctcagcctcccaaagtgctgggattacaggcgtgagccaccgcgccggcctattttttttcccacagaattatattaagagaaagaggccaggcatagtggctcatgcttgtaatcctagtactttggaaggccgaggcaggcagatcacttgagcccaggagttcaggaccagcctgggcaacatggcaaaacctcttctctgcaaaaaatacaaaaattagccaggcatggtggcgtgcaactgtagtctcaggtatttgggaggctgaggtgagaggatcacctgaacctggggaggctgaggctacagtgagcccaggtgccgctgcactccagcctggataacaaagagagactttgtctcaaaaaaaaaaaaaaaaaagaaaaaaggccaggtgcagtggctcacgcctgtaatcccagcactttgggaggccgaggtgggtggatcacctgagggtcaggagttggagaccagcctgaccaacatggtgaaaccctgtctctactaaaaatacaaaattagctgggtgtggtggcacatgtctgtaatcccagctacttggggggctgaggcaggagaatcgcttgaacccaggaggcggaggttgcagtgagctgagatcgtgccattgcactccctccagcttgggcaacaaaagcgaaactccatctcaaaaaaaaaaagaaagaaattatattggctgcgtgtggtggctcacacctgtaatcccaacactttgggaggctgaggtgggcagatcacttgagctctggggtacaagaccagcctgggcaatatgacgaaacctcatctatacagaaattagccaggcatggtagtgttccttcacctgtagtcccagctactgcagggggctaaggtgggaagattgcttgacacaagaggttgaggctgcagtgacttaggtctgcaccactgcactccagtgtgggcaacagagcgagaccctgtttaaaaaaaaaaaatgaattaattgatgtccatccagtatagagaggatcaggtatccagatccccgctcctccccacacatgcactgatcagagctgaagacctggggtatggaggggagtccgtctgcagatctccagcgagttttgtggagaaaacccctggttgttgtggatcttctcaacattttgtggtcaagagcatagaccgtagcgatactcattccgaagacttcagagtgtgggtatagagtacccatactctgtggctcttaggattgtctatggaaaaccagactgtaagggttcagcattttccacgtctgcagcttaatcagtacacaatacttactaatggatgtgttaaaatggctgctttagaacttacataagctctgaaggatttatcaccaattcttccccccaagaaaattttattgaaaagctcaactgttgagaaattctttcataacaataattacttaaaagatacacatttggccgggcgcgatggctcatgcctgtaatcccagcactttgggaggctgaggcaggcggattacctgaggtcaggagttcaagaccagcctggccaacatggtgataacctcgtctctactaaaaatacaaaattagctgggcgtggtggctcacgcttgtaatcccaggattttgggaggccgaggcgggtggatcacgaggtcaggagatcgagaccatcttggctaacatggtgaaacccagtctctacaaaaaaatacaaaaaaaaaatagccaagcgtggtggcaggtgcctgttgtcccagctgctcgggaggctgaggcaggagaatggtgtgaacctgggaggcggagcttgcagtgagccgagatcatgccactgcactccagcttggccaaaaaagcgagactgtctggaaaaaaaaaaaggctgggcgtggtggctcacgcctgtaatcccagcacttcgggaggccgaggcaggcggatcacctgaggtcaggagttcaagaccagcctcaacatggagaaaccccgtctctactaaaaatacaaaattacccaggcgtggtggtgcatacctgtaatcccagctactcgggaggctgaggcaggagaattgcttgaacctgggaggtggaggttgtggcgagccaagatcgcgccattgcactccagcctggacaacaagagtgaaactccgtctcaaaaaaaaaaaaaaaagatacacatttatctttgtggatggagatataacagatgagttagttctaactaattgtattttcataattttggcttattggaacaaatagaaatttcaggctttggggaaaatctgagcctgcagagaatttgtggatgagaatcatggagttctatgttggaaacctggcttacatcaccatttaaagattttatattatttacttcttgttttgaggttttataacttgtatattcaatgagaaaagaggtggtgagctcagttggaaaacagggctagaaatgggagctgtactggaaattttattgtgttagagtctccctctctcgcccaggcaggagtgcagtggtatgatcatagctcattgcagtctcaagctcccaagttcaagtgatcctcctccttcagccttccaaagtgctgagattacaggtgtgagccaccatgcccagctggattcttttgtttgtttgttttgttttgttttgagatggagttttgctcttgttgcccaggctagagtgcaatggcacaatctcagctcaccgcaacctccacctccccctcccaggttcaagcaattctcctgcctcagcctcccaaatagctgggattacaggcatgcaccaccacacctggctaattttgtatttttagttagttggtcagtccatgttggtctggctggtctcaaactcccgactgctggtgatccacccacctcggcttcccaaagtgctggaattacaggcatgagccaccgtgcttggccgggattcttcatatgtaaatctttttgcttctttattttttgaggtttcgctgtcacctaggctggagtgcagtggcacgatcacaactcactgcaacctctacctcccgggctcaagtgattctttcacctgagcctcccaagtagctgggaccacaggtgtgcgtcaccatgctaattttgggggtgtgtgttgttgttgttgtttggtgaagactaggtttcacatgttgcccaggctggtctcaaactcctgaactcatgtgatccccccaccttggcctcccgaagtgctgggattacaggcgtgagccagagccactgtgctgggccgtgtgtgtgtgtgtgtgtgtgtgtgtgtgtgtgtaagagacagggtgttgttctatctaccaggttggactgcagtggccaccactgccaccacacctggctaatttttttaaaatttggaaagatagggtctcactatattgcccaggcttatgtgcaaatctttatgcggcttcatgccttcactttttttttttccattgttcctttggaaattgttccagttttttttttcctgtatctttaaacaacaacacaaagcacccttttaattaagttactataaacacataacattcaggaattgttttaaatttatttgctaaatgtgggcgccttatggatgacatttggccagagctatgcagagttgccagagcttaataatgagcaataattcatcttggaaacttttctgttttgctgtttaatccagtacagatgcaggtgttttctttctgtgactttttgtgagtagttgtatctgtaaatcacctcccatggagacgggtgttcctgtgactgagagccagctgttgggtgttttagctaaacagcttgctcctagttagctgctcaaatccccctgagaggtgtatcggctgcttcagggaatagagcagatggggtgaaggtttttgcaaggcctttagtgacctgctttcaatttgctgcaattcttctgctttggctttttcctataggtgccagagttcatctgcttcatatttttactactgacgcatcttcctgtcgtatattcttagactgtggtgacttaagaatctttgggtcacctgttacatggtttctcctgccacctgtatggggaggagaagactggtattcaaactcaagcctgtttctatcttattctcattgatttttatgatacatagaaaactttgtttctttctgaaaatggcattttagtgattcattgttttctgtgggagaaagcttatgacctgctcttttctttttcccttccagagggaatctggaaaaattgcaatcaaaacatcatttctctaagaaaattttgggtaaccgaagttctggacaacaggtaaagtgtgtttaaactttggtggtgctgacaaatcatctgtaatctgcagaagtaaactgggagagggaggaggacaagttaaaaattaagtctactttgtgtcggggctttattggggatttcccatatattacctcatttaggtggtttttacctggatcctggatgtagatctgggaatctcagaaagaatctgtcctttaaaatgctgttttaaatggatttgctgttgattggatttaatgtcctcacagttcagtttagcaatcattttttaatgtctaccataaataaggtacagaagtataatttgtagattctgttatatagtaaaggggtacaatatttattgcaagaccatttactgggcttctaagtaaaaccaaaatctggtatgcgatgcagcctagctagggaagatcttcctagttcccttctgtcttttgttttagttcttaatgattgccagcagtttgtagctgtaccatcttcttaatcccttttagcacttgtctaaaatttaagtttcctaataaatcaccccttcacagtggagtccaaccgaggtgtcccctttatgttctcagtggtggtttttctgtgattggaccgaataactatacctgtgtgttttttaaatttctatctcacaaaattctgaaggtctcatgaaataatagtatgtgtaaagaacctaggtctggccaggcatggtggttcacgcctgtaatcccagcactttgagaggccaaggcaggcggatcacctgaggtcaggagttcgagaccagcctggccaacatggtgaaaccccatctctactaaaaatacaaaaatgatggtgcatgactgtaatcccagatactcgggaggctgaggcacaagaatcacttgaacctgggaggcggaggttgcagtgagccaagatcacgccactgcactgcagcctgagcgaaagagggaaactgtctcaaaaaaaaaaaaaaaaaacaaacagaagaaccaaggtctgagaaatatctcagtaaatagtagctacaagtttaccttttaaaccagaggagatatgaaagcaatccatactttctgggaccttgtggggccaacaggtgttgactgaggtgaattgaccttcttgaagatagtagagagtgagatgctgtttattctttttttttgagatggagtcttgctctgttcaagcaattctcctgtctcagcctcctgagctgctgggattacaggtgcacaccaccgtgcccgggtaatttttgtatttttgtagagacggagtttcaccatgttgaccaggctggtctttaactcctgacctcaactaatctgcccgccttggcctcccaaagtgctgggattacaggcgtgagccaccctacccaactgagatgctgtttattctaacatttgttccactgtgaaccttgaggttagatttcaagtattcaaagcagtagttcctagagatatcataattagtaattaaattaagatttaatatttgttgattttattttggtatttttccacttttatcagggcataccaattcaatcaccatgagttggagcttcctgactcgcctgctagaggagattcacaaccattccacatttgtggggaagatctggctcactgttctgattgtcttccggatcgtccttacagctgtaggaggagaatccatctattacgatgagcaaagcaaatttgtgtgcaacacagaacagccgggctgtgagaatgtctgttatgatgcgtttgcacctctctcccatgtacgcttctgggtgttccagatcatcctggtggcaactccctctgtgatgtacctgggctatgctatccacaagattgccaaaatggagcacggtgaagcagacaagaaggcagctcggagcaagccctatgcaatgcgctggaaacaacaccgggctctggaagaaacggaggaggacaacgaagaggatcctatgatgtatccagagatggagttagaaagtgataaggaaaataaagagcagagccaacccaaacctaagcatgatggccgacgacggattcgggaagatgggctcatgaaaatctatgtgctgcagttgctggcaaggaccgtgtttgaggtgggttttctgatagggcagtattttctgtatggcttccaagtccacccgttttatgtgtgcagcagacttccttgtcctcataagatagactgctttatttctagacccactgaaaagaccatcttccttctgataatgtatggtgttacaggcctttgcctcttgcttaacatttgggagatgcttcatttagggtttgggaccattcgagactcactaaacagtaaaaggagggaacttgaggatccgggtgcttataattatcctttcacttggaatacaccatctgctccccctggctataacattgctgtcaaaccagatcaaatccagtacaccgaactgtccaatgctaagatcgcctacaagcaaaacaaggccaacacagcccaggaacagcagtatggcagccatgaggagaacctcccagctgacctggaggctctgcagcgggagatcaggatggctcaggaacgcttggatctggcagttcaggcctacagtcaccaaaacaaccctcatggtccccgggagaagaaggccaaagtggggtccaaagctgggtccaacaaaagcactgccagtagcaaatcaggggatgggaagacctccgtctggatttaatcctggcgggcttaaaacctgtgcttttcatagtttatggtaagcagcagctcactgaataatgacttccattgagtaaacatttggctctggttatcttcagggatgctgttggctcatgatccaagctcaggggactctggaggcggggctgggctgagggagagaaagggaaacacagtgttcccaggcacatgttcttagcaataatacagttgcagaactttacatttgtgtcttccagatctggagaagaacagacatatttaaatcattcttgttgaacagtttttgtatgtacagtattatggtacttttttttttttagtatgagaactttttttgtatttgtacattgaactgctgtagttatacttttatattaaaggggaaaaagtccttataaataatgcctattaggctagtgctattactttgttcagcaaattctaccctggctttagagtttttaatagatgctacacctaataaaagtgcctctcatattgcaggaacgatttcagatgtgtaaggagactgaagaggagataccagtttttagtcttggaaagcaagttcacagtagaaggaggttgagatctttcttttatgtgagaaatctttgaatctcattcatgcgatcagagttgtagccaatttttgaaaaccttattttcaaaggaaataaatgattcactgtaggattcctttaaatatcaagcatcaccagtatatgctttgatggtatatgtatataacttaaagttctttcaaaagcctgatacagaaacgtgtccccagtttggtagcaatgtggaaaacctggctagagatgatatggagctgtccctcagaaagcaaagccatgcctggaatccctaataggctgcttagttgtgaacctgtttgatttgccttaagcctctatccagaaacctgcccgcttccgtctggttaagaagccagtggtggatattttctttgttaacattagaaatgcaaacattcccttgtcaaccaagaatactcaaagctacttgtattggaaatggcagaaggcctaaatccaaatttcttattttttataatttaccatagaagttttgtgattaaattcttacttctgccagtggaggtttatgcctgaaaggtcatggggtcctgtctgtaaatagacctaaagagaagtgcagtatttattctttgtaggcataatgtgtttgtcactgacaagcattcatgttcatcccactagtcttttattgcagtcttttattgtcattttcagccttatgttggagagctttgctttctcatcatgttcacattgtcttaagttttgtgagcttctgagaaagagcttggtaaaggtttaaaggggactttgttccaccagggagcattttatttgggcgtctcacccttttctaatgaaagctgttgtaagccacctctgacttggaaattctgaaagtatgaatattttttatatcttaattgtaaaatgccagttctccattatttagatgaatagtagaacactgcaccctttgtgcagtgtttttgtttctctactgcattcctacccccaccaaaaaaaagaaacttaaggaaatttttttttgagacagggtctccctctttcacccaggctggagtgcagcagcatgatctcagctcactgcagcctctgcctcccaggctcaagcaatcattccacctcagcctcttgattagctgggactacaggcatgtgccaccatactcggctaattctgttttaaaaattttttttgtagagatgaggtctcactatgttacccaggctggtctcgaacttttgggttcaagtgatcctcccgcctcagcctctcaaagtgttagtattataggtgtgagccaccatgcccagcctagaaaatttaaccttatcttttagccattcatttacttttatttgcttttttaaaaaaaaatctttaaattttagcctagagaagcacctcaggaactctaaacatcttaggcaaaaattaaactcaggtgagactgaaggagaaatttcagaaatacacatgtacctcatgggtaattaatagacatgcacagtttccttcaaatcaaatgtttaataaggaaattcatataattccaagaaaacaggcaaaatttggaatacataagcctagctaagataaagaactaccagttaattcttaacatcactggagcttccagcaggttttttaattgaaggacaaaaagtgtccatacatttgtgttatctcttcagagcctgagggagaagagagtggctttgcccagtggaaaggctggggatttgagaatgatacagggggaaggagtcaagcagaaatgccaggaagaaccaggcaaagacatttggcgccagaagcatccacttaatttctgtgaagagtgcccctggtgtttcatcttggcctgttttgatgagaatgttatcttttgtgtctggataacgcgtcagcttcttaaagtacatataaagatattctgtcacctccccacatgcacacacttttaaaatctatttttattctcttgctaaagttgtaattatgtcaagaattttccagctctaactgccttcttagtacatgtctttctgcctttgaagcatatgagtttgccaaagtcattctcccctaatgacatattgtggacttacattaagaaaatgggccaggcgcggtggctcacacctgtaatcccagcactttaggaggcccaggcgggtggattacctgaggtcaggagttcaagaccagactggtcaacatggtgaaactccatctctactaaaaatacagaaattagccaggagtgctgggtggacgcctgcaatcccagctacttgggaggttgaggcaggagaattgcttgaacccaggaggcagaggttgcagtgagctgagatcataccattgcactccagcctgcaagacagagtgaaactcttgtctcaaaaaaaaaaaaagaaaaaaagaaagtgagcctgttgatgtctagctaacccattggtggagtctgcattgaatctgtaagaatattgttctggatcatgcaggtgggatttgtataaaaagcctgtccaacatttagttctcactcgcatcagaatcatactgttttgaattgccatataagacatgctccatcatgacacttgcttctcctccaaatacaagttgagtgcttagtccttcacctgctagaatcaggatacaatcaacatgattatgttccttaacacacttggatttatgcagatgtggtgtgtcctttgctcttttttttcttaagacagagtcttgctcttgtcgctcaggctggagtgcagtggtgtgatttcggctcactgcaacctccgcctcctgggttcaagcgattctcctgcctcagcctcccgagtagctgggattacaggcaccaccaccataccaggctgattttttttgtatttttaatatagacagggcttcatcatgttggccaggctggcaggctggtctcgaactcctcacctcgtgatccgcccacctcagcttcccaaagtgctgtgattacaggcgtgagccaccgcgcctggcctgctcttaaaacccgttattcagaagatttgtaaaagaaataggctttttttttttttttggttaattcaaacgaggggaaaattagatagcattttcccctaaagaaatgttaatgttcattttgtggctttgttttcaagtttcaggagccatgtacatctcagaagtgttacgaagtgattagaaaaggcctctggtaaaagaccttcaaggaccaaccattattattggtcacttgtttgaacttggcgcttaaaaaaaaagttggactgtgatgctttggtgctctttatcacagacatcagtgatggtctgaaacactctctagcagtttatacgaagaatggacttacatgttatcagttacactcatgatttactcgttcagcttctacaagtccatactttatgctgtctcatttaagagacagtccacttctgaaaataaaatcgatagttgatgatacatttttggctagccagctttctgtaaaaggcaagtatgttagacatgcacagtttccttcaaatcaaatgtttaataaggtacttcaagaaacgcctttttaaaaatcaaaggttttggccaggcatggtggctcacgcctgtaatcccagcactttgggaggccaaggtgggcgaatcacaaggtcaggagtttgagaccagcctggccaacatggtgaaaccccgtctctactaaaaataccaaaaattagccgggcgtggtggtgggtacctgtaatcccagctactcaggaggctgagatgagaatcacttgatcccaggaggtagaggttgcagtgagccgagattgcgccattgcacttcagcctgggcaacgagtgaaactctcaaaaaaaaattcatagtaataataaagtccctgcatgcagtttggaaataaaatttaaactcatttatgtgtaataaatatgtaataattcacagtcaccatcaaatgttggaatcattgaattgcatacttgtactcattccggccacatcatgaagtgtttaaagatttgtatttgctgttgtccctatgtagttctattgatgtttggttttgttttttggggtttgttttgagcccaggctagagtgcaatggcacaatctcaactcactacagcctggacctccttggctcaagcagtcctcccacttcagcctcccaagtagctggtctgcaagtgctcaccaccacacctggctaatttttgtattttttgtagagacagagctctcactatgttgcctagactggtctcaaactcctgggcccaagcaatcctcccatcacagcctccgaaggtgctgggattacaggcataagccactgtgcccagcctgtttttaataatgatattaagtgggtttggttcatgtgttattaatcagtgttaataatcgtacttttttttttttttaaaagaaaccatggtattctaaaatcaggagtccaaataaaagaaagttctcggctgtgcatggtggctaacacctgtaatcccagcactttgggaggctgaggtgggtggatcactagaggtcaggagtttgaaacaagcctggccaacatggtaaaaccccctctctactaaaaatacaaaaattagccgggcatggtggtgcacacctgtaatcccagctactcgggatgttgaggcatgagatttccttgaacctggaaggcagaggttgctgtgagccgagatcgcgccactgcactccagcctgggtgacagagtaagactgtcgccaaaaaagaggaaaaaagttatccagtgcagtttctacagagataaaagaagtaatagttctggctgggtgtggtggcttatgcctgtaatcccaacactttgggaggccaaggcaggtggatcacatgaggtcaggagttcgagaccagcctggccaacatggcaaaactgtctctactaaaaatataaaaattaggtatggtggcacgtgcctgtacttacagctacttgggaggctgaggcatgagatgacaatctcttgaacccaggaggcggaggttgcagtgagctgagattgcaccactgcactccagcttgggtgatggagtgagactcaaataaaaaaggtactagttctgcatttcagagttggcttgttgaaccaggctatatgcttccaagatttaaatgtttttctgtattatactctcaattgtgttttaaaaaaatctcttacagaaatctctacctcaggcactaagtgttatgacatgggtagcatattgatattgaaaacttagctaggacttccagccttttaagataatttaaatgtaaaattaaatggttaaccagcaatctaatgtcatgtggtgtgcagtttggatattgcatgaacagctaaggaatcacctgttctagtgccaaagatcactcattgctaattttgttctgtacagcttatgtaatattttcatggtggagacggactctgtgtgctcagggccttgtctctaggaagattttgtcaattccaaatacagttttgaagattcatttgtggtttgtgtttcctttctcagaattcgaaaccaactgaaaatcagctgccaggtaatgtcatattgaggattttaccctatttatataagataatacccaagagcttagtgatatacacagaaaagctaatacgaaaatctcttcctcatacatttcacctgtaagttgatcttggtgggaatacttgagcagagaaatttccaactaaaggtttgggcttaaaagatgccttttttcatagctgatttgaagctcttctgggactactgtggctaaataggtcagcatattcgtggcgtcgcaatctggggaatataggtagcctggcgggggaggctggggtctaagctcaaaagctgggaatgcacccttgacttccctcggttctggaggcctttcctggagtgccttctgcaagggaccctttgcggcagcagagtcagcagtgtcgttgaaaagcctaatccacctcctgagaagggagcagcaatgccctcttgttccctcagacacgggatagccgactggtaggtcacgaacagctcaccctcagcagcacagattgtaaactggtcagccaaccatatttggtaatgaatttgtgagctatttgaacgctattggagcagttaaatcactctggatctgttagttttgaaagtagattctttggcagatttgccatcagaacggagactaatacctgtggcatcaaatctgttttctttgctacacagagtttgaaaactgtttttaaggttttaagggcttatatgatacttttagggtttgtttcctttagatatctcccattggaagcaggttgcacaacggcatgaagaatatggaagcagaggcaaatttgggaacagaatccaggtctgtacaatccagtatcctttgttcttgcaagaggagggtccagaagcagctgttagcgggtgctcacaagggtttaggggcatctttgctgggtggaccttgcatctgtctattataatactttttcaaaatgtaaccattggaccattggactacttgttagaagtaacaggaatgctattaacatacagattcctaggccaaggcgggcggatcacgaagtcaggagattgagtccattctggctaacatggtgaaaccccatctctactaaaaatacaaaaaaattagccggccatggtggcgggcacctgtagtcccagctactcaggaggctgaggcaggagaatggcgtgaacccgggaggcgaagcttgcagtgagccaagattgtgccactgcactccagcctgggcaacagagctaggctctgtctcaaaaaaaataataattaaaaaatatatataacagagagagatagcgatatatagattcctagtctgggcaacatagtgagaccctgtctctacaaaaaataagcaaaaaattagctaggcatggtagtactcacctgtagtccgagctccttgggaggctgaggcaggaagatcggttgaccgccaaggtggaggctacagtgagccgtggttgcgccactgcacgccaccctggatgacagagcaagagcgagaccctgtctgtctgtctctctatatatatacgtgtgtgtgtgtgtatgtgtgtgtgtgtgtgtgtattttagatccattgcagacctacataatcagaactaacaagttctctgggggattcatttttttaaatcttttattaagatataatttacatggagtaaaactgttgcatagttagaaatgcatacagttaagtaaccacactagaaagatgcataatagttgcattacccccaaattacctggtgattcttatgtacattatagtttgaaaaccactcatttttaaaaaattgtttgaagtagccaaaataaaaggggaaagagaattgttttgaattacctcctctgttcaagaaggtttagacctggcatagcacatgagtttcatctcatcagtcagctcagaatgactgctggctccctggaggggagacctacatagaggatccagggactcctctgggttcagccaaataatctatcagtgattttgaggttggggcagggttgatggaagagtgtgccatccttgactagatgttaagcatgtttcaaaatatcattgatatgggagtgctgggaagggaagaggtggtccctttaaatgatatggaaggggggaagggaagtgctgcatagaggatggcatggttcctggctagggctccacccccacggacctaggtgaggactggcatttcctgcccaaatgcttcgcccccattccctagaccctagtaggcagatgcaggtggctggatgtccggaggaacactgacaggcaccggtgcgctggcaggccaccgacctgcagaagcagaatgacatggagtttggcctgggcagtcagaggagagcccgggccgccaagcggccggactccaggggaaaagcatctcccttctggctcccccatctgctgagagctacttccactcaataaaaccttgcactcattctccaagcccacgtgcgatccgattcttccagtacattaaggcaagaacctcgggatacagaaagccctctgtccttgcaatgaggcagaggtctaattgaactaacacaagccgcctatagacggctaaactaaaagagcaaaactaaaagcacacactgtaacatacgcccactggggcttcagctgtaaacattcacccctggacactgtcttggggtcagagccccacagcctgcccatctgtatgctcacctagaagtttgaggtttgagcagcagggcactgaagaagtgagccactctcccattgcacaccctgcaaggggacaagggaacttttcctgtttcatcatgaaataatggatttagtggccgggaggggtggctcgcgccagtaatcccagcactttaggaggctgagtcgggtggatcacgaggtcaggagttccaagaccagcctggccaagatggtgaaaccccgtctctactaaaaatacaaaaattagctgggcgcagtggaaggcgcctgtaatcccagctactcgggaggctgaggcaagagaattgtttgaatctggggcaggagggcagaggttgcagtgagtcaagatcgcaccactgcactccagcctgggtaacagagtgagactccatctcaaaataaataaataaaatacgcatttagcacttcgggatcatgactatgactaggcccatgtgaaaagaatcatctcaccttgtatgtaagcaagagttggtgtcattacttagatatttctccttcctacagttaatgacatcttggaggaacttagaaacaggaagtgactcaggattgggaagcaccagaaaaagagctgctgacatgacatggtgacaagcattctttgtcaattgactttttctcccgccccctggatcctaaggaaacggcacagcatttccttgccctgcccttgacgtgctatgcctactctaagctagataggggcttctgaaagaaaaacctaaggaagccccctgctcatgcctggaggaaagaactgccgactttgtctttgccctcagccaaaccgccacaagtatctttgtctgcctggctctcctggggccatcacagagggctggggatgctgacagccgtaaactccaggcgaggcagaaccaagcagctgttcataagcgatttcagtgcatgtccagtgacccgaatgggacccgaccatggggaaaatgatacagaactagatcgctttctttaaattttatttttagtttgtgtactcctatggaagtgtaattttatctttgtgctgggaacactgaaaagcactgacggggagctcctttggcctggcccatttttctgaaagcacgttgcagctgtggcttctgcccagcaggcagagactgatgttagatcctgtacccagctgctgctgggagaagggacagactcagcttctgactgcaggggcatctgcaggaagatcggggaaactgaagacacttttaactgcaaaagccctagaaacagtaagtgcaaattgttccgtggattgttgacttcacattcaaaccatcgggaagtgatcgagactggaagcgtcgacaaggatccgcagggtctgggaccagagaccagcttgtgatcctgctgtggagtgctaggggtctgctctggggagggggctttggcctagaagagacatggtacagggtgggaactgttacagtcatgcaacacttaacatcaggtgattctgtcattgtacaaatatagaaagaactcacactaa

SEQ ID NO: 37 - DNA, 9897 bp, Homo sapiens
acacaccctcggggaggaccagcatccaagcaggtggaagggctctgagggagactggaattttctggcctggagaaggtagggtgctggggtccatgtatgtacctcatggggctgggggctgttgccccaggagacagcctcacgctgtgccccttggccttgaggccccgaaggagggagggcttcctagggcccagccataggagggtgcactccttgcgcctgccaccccctcctgggctccgctgctccacgcagatggtggggtggcccccccactccatgtctgtgtccttcaggcccagctgccttcaccgcagggtgggcaccaaccggtggggtctgctctgggacagctggcaagcgggaggggggtgccttcagtacctcccccagcagctggggcccctcaggtagtgatagggctggcctctgaaacaccagccagctgcattgtgtccaggcccagtcccccaccctcagcggccacctggaggtgagggggccagcctgcccctggtatagacagacctggggccctgctcagtcccctccatagaaggccacaagccactaagtttgcactggggcccagcctaggtctgaagcccagcagaccctgtggtcaaggatccaaccccagtgcctgtcagtgctgtgattaactgggtggaggcccccccggggtgctggggcaggccctcagtgcaaggaaggggcggcgtggctgaggagggggaggcccacacccctctgggagggcggagcaccccagggctgctgcgcagggaggccacagcccaggcgcgggggcccccatcccagagctggatggcagtgagcccaggattcctggctgctgggcgttcaggagggaagagacgggttcgtggatcctgcgggtggagggcagggacagccttaggaggctggggtaatcatcaccccctcactcccagtatggatacccgccagggctcggtttctggagggtgtgtggctcagctccaggcctgcaacagccctggaggctggcctggggagctgcccaggcttcagcgatgacacactcccagcctgacccaggcctaactcgcccccttggtccacctccagaggaggaacagcccctcacttctgggcctgacagctctgttcctgcttgggaccctgagggagggaactcaagaacaggctgcaggaggggcccacgcattcacagcgccaacaaccccagggaggagagggctccacgggggaggaggcaccagcctggatgctgccttgccacctgcacgtgtgcacggccctggcaaggcctggggatcccacagactcatacctccacaccacgctcctcagtgtcccctcactcccctgacattcctgagcgccacacccatgctcttgggctcctgggggtctggtcagttcaggagctgtggcaggccatgtaaggggagccaccatgtgggcaggcacttggggtcttggtgggggcaccttgctttcctgggcctggtggggactcctgagggaggcacgtggtgaggttgagtctgaatagggagggttcatggctatgtgtgagagtgagtgtgtgagcccagctccatgttgagctcgagcagcagtgtgcatgtggcagtgtgcactgcttgtgtgtgggggggtggagggaggagcgtgccctgtgtgtacatgtgaaggatgcatgaggatggctggtgcccacacccagtggggcctactgctgcacaggcaggacagtgaggccggccacagagctgctggggcagagtgggcatggagggagggttccaggcctcgggcttgggtcctaggtggctgagctctgcacctccctctggaccagggcatccagaggagcatggctgagggtgcactcggggctgaccgtcccagggcctgggctgtccaggacaggcagctgggggctcaggcagggacatggaggacaggtagtggagctgccaccacagagctgagctctgggcatcagggtagggggctacggcctgtcagcgggtgaggagaaattgaggcctgaggatgggtgagtgctgtagccccctctgagtgaggactgtccccacacagggccctgcagtggagtgcaggggaaggaggggactgtgcctgcaggagctccagggaagtgggactgggaatctgctttggactgtgagtggacaagcgacagcacagtgcctgccatgcgctggggtaccatcattttcggggaagggaggagcctgccccagggtcccgcctggtgaactgtgtgcgtgggtgcctgtctggtggctgccctaaactgcagaaaacacccacccttcgcggcctgccctgggagggcctggagatggaaggaaatacctgggcccctgaccctgtgctacacccagcagggcggggctcgttctgcagtgcctcaggacccttgttcagacccaggatgagcaggagcttgatgggggagggggcccggctctgaccggtgtcctgagataccaggacaccaggacactggtcagagctggcccagccaggtttgcagacaggcagcctcagcttgggcctgcttgccctgaaacccttcccagaggtggcccccactgtgagcccccatggtgagtccctttgctcttgctgcgcacccctttgaagcccttcctgtgagcccccgatgccaccagggcgagaccgcccccactgtgaagccccctttcacaccctggcctagtagcgagcccccatgagaccctggtccccagtatgagaaccctgtgagtccccggccctccaccaatgcccacatcctcctctacttcccacagccttccctgaggctgaccctgcctcaccactcccagacctgggccaggcagcgtcctggctggtggcctcctgtggtcacccccctacctcgccctgacaccttactaaccccagcagctgcctcctcccagactctgaagcccaagggtgcctccagttctttggccaagctgaagcctctccccaccaatcctcattttgggcaccctggaggtgtagctttggggtgagatctcttggacttgtgtgcacatagtctgcaaatcccgggcctggctccctgggggccagcacccctcccctctcctcccgtgggcctccaccaagcccctgctgacagcctcatcctgcagcactagacagtgcccacctcagcttgtcccgcctctctatcatggtcctttctttaagtaggggtttattttacagcactttcacagaaaagggccaaggtgtggatggctcatgcctgtaatcccagctctttgggaggctgaggcaggattgcttgaggccaggagatcaaggagacgatggtgagttatgattgtgcggctgcactccagcctgggcgacagagcgagaccccatcaaaaaaaaaaaaaaaaagtaaatagggtctggctctgtcacccaggattgagtgcagtggtgtgatctcggctcactgcaatctttccctccggggttcaagcgattctcccacctcagcttcccgagtagctagaagtacaagcgcaccaccatgcctggcaaatttttgtattaagaccccatttctcttttcttttttttttttttttttttgagacagcgtctcactctgttgccccagctaagtacagtggtgcaatctcggctcactgcaacctccgcctcccaggttcaagcgattctcctgcctcagcctcctgagtagctgggactacaggcacgcgccaccacgcccggctaatttttgtatttatagtagagatggggtttcaccatattggccaggctggtcttgaactcctgacctcatgacccacccacctcagcctcacaaagtgctgggattacaggcatgagccaccgtgcccggcttaagaccccatttcttaaaaaataaaaataaaaattgccagcatggtggcatgtgcctgtagtcccagctactcaggaggccaaggtgggagaattgcttgagctcagtaagatttacagaaatgctgtgaggatagtgcagagttcttatagacctcacacccagtttccccgttgctgacgtcttgcattagcgtgacatgctcctcataatgaatggaccaatatggatgagctgggattaactgaggtccttgctgtatgcagatgtctttgcctctcccctacagctccttttctgccccgccatggatcccacatggtgtcagtcaccgtgtctccctggactcctcttggtttcggcagcctcctgggtctccttgtatggggtgtcctcactgtctggatgaacactggccggatgttctgtagcatgccccttgggtgggatccctttcaccctcatgtttccttatgagtcttcagggggatgggttttgggaggaataccatggagttgacgtgaccttcccatgagatgctgtgaagcatccacaccattcacgatgcttgtgatgacaccttggccgcctggccagggttggtgtaggaggcatgctgcagaggcgctctccccctctccctcccacaccctctgaagccaggttaccaggtgcagcccacaggtagggatgggggtcatgctcccctccagtacagagtgtccacatggctgctttggattgactctgcacagaggagctgtctcctgtcccccatttggttatacattcagtcacgtactttggcttctaatctatgtcagtctgtaatctgtaacacaagactacttgatttctttcactgctcagagggatccagtctcaggcactgggtgctctacgtgcaggtgctgcttgcacagacttcctctctgacactacagtttgcgccaggctcttctgtacattcccagccccagccctcgggtctgccagttccccaccaggggttcctgattcctgtgattgggagtggaggtaggaaccaaggcctgggccccaggtagattcttgctcctagggtgtttttgcattgaggcctttgcaggcgccagagcaaaggtgtgtgtctgaacccaggtgcatccacatagctgtattttctatgaaaccgcccacgtctctgtgagacaccctgtggtctccagctgtgatcgtcatcacatggaatagtcactagcagcatggaaggcggtgacacagcgacagcctcagggaagggctgaacctgtgtgtgtgcgcctgtgcatgtgtgtgtggcgaggccaggtagcaaaggctcctggtgggagtgggctccagccagtgtgggagccgtgggcagagcacacgaggggatatctggagccaggcgtggaatgggggcaggggacctggcactaaggcaggtgaggccgcggcattcgctctggttaggagtcacaggcagggcaggagtcctgctgggtgggcgtcctaatgctccccaggcttgcaggcaaggagtgaagtgcttgaggccctgcaggcggggccaggctcaggattggctgggatagggaagctgctctgcagagcagagtggcatttgggtgtggccctctggcagtggctgtgcttgctgggcatctgagtgcccatgttgggggtggcagcaggcccaagagagaattacaggctggaggtgtggatctgggagtccccataggcgtggccctgagaccaggacccaggttcttccagaccattcccaggaccactatgtgggtgcaagtgacacaggcccccagagctaagtgccagccctcagacgccagggcacatcagcccagggccgagccacagtggtctccagagctgagccaatggcgccgtttcctcagctgaatcaaggaagccactccgcagtcagccacaacgggaatgctcacaccatgggcactggcaggcgccattactgcaggctgcccccagagagccatttgttcaatattgcccccacacagctgggcaggctggccctggcactgaaggcctcctgccccatctctcccttgagcctgctctgtctcaggttcctgtcgggctggaatcagtgggccttagcctgctgtgatgggtcaggtggggagggaggtgggccctgcctactggagccagggagataggggaggtggcctcagggctggagtgtgcccgcctgtgcatgtgtgtgcctgatcacacgtgtgtgtgtgtgcacgggtctgtgtgcatgtgtgtgcatatatgtgtatgtggttgtgcatacgtatgtgcatgtgtgtgcatatgcacaagtgtgtatgtgccactgttttcatgcatgtgcatctgcatgtgagtgcaaagaagcatgcctgtggatgtacacatacatctgtttgcattaaccctgtttgcatgtgtgtctgagcatgcacgtgtacatgtgtatgcatgtgtgtgcatgggtatctgcatatgcatgtgcgtgttcatgcatgtgcacgtgtgtgcatgtgtacacatgtgaatctgtgggtatgtatctgagtgtgtgtgcacatgtgaatgtgtgtggctctgaggggtactgcacagatgtgaggaagcagggccacttccccaggaaccctgactgccccctcttcctgccccgggtggggaggcctcagctgcataaagaggccgggagcctcaccagcgactgctgctggtcccacacctgccgctgctgcctcccaggccaggtaccgggagggggccagaggcggagggagctaaggggtctcctgcctcagcgacccaggagcaggtactggccctggggcaaccgccagcagagggtgggcaggggagctgcaggagctctccttctttggagcacaggccctgctgcacagccctttcctgggcacttgcccaccttgggcttggctggtctgcggcatagctgtctctgagggtcgcaggtgctgagtgtggcctcacatcactgggtctataacctcgctggacaccgtccctcctggacggacgactggcttcatcctgaccccagctagagatggtctgggttgagaccatggaggaccaggaacctagactgggcgggcggagccctgggaccctgggcacctgagaagggcagcgggaccagccgggggctggagggaggatggaggattttgtggaggtggagggaccccgacgcccctgtccagggtgtggagggaccccgacgcccctgtccagggtgtggagggaggcagagcagggcctctgggggccgaggggctatggggattgtggactggtggcactttggggtctgggagctgatggtggtgcaggcacggggggctgtgaaggactgagggctgatggggctgcaggggcttgggggctagggagctggaggggccaggagggattgagtggctaggcaggctggggagaccctttggatgctgaaactctgtgggaccctccccaacaacctggatgcggctggggctgggttggtggccatgggtgcagtggacactgagaccaccagtccccacacacttgagtggtgcttgcctcagtgtccccatctgcctcatgaaggcaactcacccagctggggccctgcatctgcacgagcaggggccggatcaggtgggggcttccacttccgtttaaggcggtaagctccacgtcattgactgtgtaagcagagaggggccagctgcgaggcaagcctggagccccggctctgagcgccgcgggctcctaagtgcaggcccctggctgacccctaccccgccccacaggacccgcccgcccgcccctatgaccaacatgagctggagcttcctgacgcggctgctggaggagatccacaaccactccaccttcgtgggcaaggtgtggctcacggtgctggtggtcttccgcatcgtgctgacggctgtgggcggcgaggccatctactcggacgagcaggccaagttcacttgcaacacgcggcagccaggctgcgacaacgtctgctatgacgccttcgcgcccctgtcgcacgtgcgcttctgggtcttccagattgtggtcatctccacgccctcggtcatgtacctgggctacgccgtgcaccgcctggcccgtgcgtctgagcaggagcggcgccgcgccctccgccgccgcccggggccacgccgcgcgccccgagcgcacctgccgcccccgcacgccggctggcctgagcccgccgacctgggcgaggaggagcccatgctgggcctgggcgaggaggaggaggaggaggagacgggggcagccgagggcgccggcgaggaagcggaggaggcaggcgcggaggaggcgtgcactaaggcggtcggcgctgacggcaaggcggcagggaccccgggcccgaccgggcaacacgatgggcggaggcgcatccagcgggagggcctgatgcgcgtgtacgtggcccagctggtggccagggcagctttcgaggtggccttcctggtgggccagtacctgctgtacggcttcgaggtgcgaccgttctttccctgcagccgccagccctgcccgcacgtggtggactgcttcgtgtcgcgccctactgaaaagacggtcttcctgctggttatgtacgtggtcagctgcctgtgcctgctgctcaacctctgtgagatggcccacctgggcttgggcagcgcgcaggacgcggtgcgcggccgccgcggccccccggcctccgcccccgcccccgcgccgcggcccccgccctgcgccttccctgcggcggccgctggcttggcctgcccgcccgactacagcctggtggtgcgggcggccgagcgcgctcgggcgcatgaccagaacctggcaaacctggccctgcaggcgctgcgcgacggggcagcggctggggaccgcgaccgggacagttcgccgtgcgtcggcctccctgcggcctcccgggggccccccagagcaggcgcccccgcgtcccggacgggcagtgctacctctgcgggcactgtcggggagcagggccggcccggcacccacgagcggccaggagccaagcccagggctggctccgagaagggcagtgccagcagcagggacgggaagaccaccgtgtggatctgagggcgctggcttgcgagctgggccagggaggaggagggttggggggctccggtggaaacctgcgaccccttctcctcagccttctccttagccggtggcctcaggcagactctgcccagaggggcagccaggctgctcagggaaggggctgaaagcggcagaggagtgccctggcttggtcaccactggggccaaggtggggtggagagaggcctaggagccagaaagggccctctgctgtggtctgaaccccagggggagtggggcattgactccacccctgtcctgagctggaataggtcctctgggatgccagctctcccctttgtgcttccctgcagcaacccatggagggcccagggtgcctggtatgggcatcagttggtgggggtgcgggggtgcgtgtccccattccctgcaacagcaaatggggctccttcttcagccctccccttcccagccccaaactgagacagactgggagctgggagcctggggtggacaggaccataccctctttgagcttctgcgatgccggccttccgttcctctgggaggcttgaagttctgcaaagatgttgatatgccttgcagcttggacccaatgggtggtggtcagggcctgggggcttggccatgctgggggaatggggctctgggttcctgcctgtggcctgtctgtcctcctccctaattcagacccagcctcaagaggaaagggagtaaaataaaactaacttgtttataa

SEQ ID NO: 38 - DNA, 6355 bp, Homo sapiens
atgtgtggcaggttcctgcggcggctgctggcggaggagagccggcgctccacccccgtggggcgcctcttgcttcccgtgctcctgggattccgccttgtgctgctggctgccagtgggcctggagtctatggtgatgagcagagtgaattcgtgtgtcacacccagcagccgggctgcaaggctgcctgcttcgatgccttccaccccctctccccgctgcgtttctgggtcttccaggtcatcttggtggctgtacccagcgccctctatatgggtttcactctgtatcacgtgatctggcactgggaattatcaggaaaggggaaggaggaggagaccctgatccagggacgggagggcaacacagatgtcccaggggctggaagcctcaggctgctctgggcttatgtggctcagctgggggctcggcttgtcctggagggggcagccctggggttgcagtaccacctgtatgggttccagatgcccagctcctttgcatgtcgccgagaaccttgccttggtagtataacctgcaatctgtcccgcccctctgagaagaccattttcctaaagaccatgtttggagtcagcggtttctgtctcttgtttacttttttggagcttgtgcttctgggtttggggagatggtggaggacctggaagcacaaatcttcctcttctaaatacttcctaacttcagagagcaccagaagacacaagaaagcaaccgatagcctcccagtggtggaaaccaaagagcaatttcaagaagcaggtgagaaggacacgctctcttcctgtcactgatgtttgtgtcctgatgatctcctcccggggcaggtccctcacctttctgggaagtacaacttctgcatgttacaaagtaggtaaccaggttctaggcagatgtgttctgaccgccactcccaacccttttctttgttctctcttgctctcaaaatctatcccaatgtccatccccatcaacttgatggttccttccagcgaacaaggacaagagtgctagtccgttgtccctcctgaacttccatttaggtctctctccacttaggaaaaatctcagcttcttcttgattctctactttgcagagttataaagacacctgacttgcctgaaggaaactctgtgattgaatcttctttccaacatccagtgagtggggattcatgtctgtgacaaattagaggctgttgaaggatctctaagggccccttgggccatgtagtctaaagcatttcctgactgtgccttttcactggaattttctggtgtcagcatcacaatttttatgggcttggttcaagagtcagccgggagaagcctccctaaactgtgtctctcccctgtcctgctcaataaatattgatgactgctgttggcattcctgttgctgaagataatgccccttcctgtctcactggcttcatttacctcttttctgtttttccacattctctgctccccttatcatcaaagttttgtaaatgaatgcccctcagacctgcagcacatgtcataagccagaaactctgggcttcaagcatatataagtcagtgtcctctaatatctatagatttatccaaatacccggccatatccttaaggaaaattactgtgaattcaggggcttaggcccccttgatcactgatagctctgatttctgctcaattctcattcttcatttctgcagttctcgttgcagcttgttacaattgtctccagaactgcagcaactcatgctggaccaagttcctactctttaatttcataaccctcaataccacacagaaaaagcagtagagttctactgctgatatgctgatttgggagtaacagcaagggaggctgacatcacagtgtgattcggcgggtaactgcaatctgaatatcagtcttctcgagtctcttagtcatttctgttggacagtgttgttctatccctttttttttttaacagaacgctgccctcttttcttagttttctcttgccctgaaattctcaacaaaggcagttatctatttttttttctctttctgaatcccaaattatccccaagtaagttaggggatcccaagggatgctttggcaatagctaggaaattttttttttcttcctgctacacaagtgcttcataagaatccctcatccactgtagccagagcccagccaaagtgaccaaggaaaaacgcaaatagcatcatttggaattcttccttataccacccccttttaaaacagctttattgagatataattcatacaccatataatttatccacttaaagtgaggcaggagaataggttctggaggaagggaacctaaggctgtttcacgccaacttcctaggactaaattgaaaggaaaactctaactttccttgcctaagtaacacaaggaccagaggctactccctttgcaacacccccaccttttctgtgcagcagatgggaaattgcctgtccccaacaaatcaggctgtttgcagatgagtcttcctttgcaacttcgtaacttcttcctagcctctgattggttgctttctgcaaagcatgaactggccaaagggaaacttctagtgggtactgggacccaagaagattgtgtatccgtgcccttgaaccgctgctcggattgctcccacactgtggcgtgtactttggttttcaataaatccctgctttcgttcttttgttgcttcatcctttctttgctttgctaggagttttgtccaattccttgttcaaaacgccaagaacctggacaacttgcagtcactatcctctaccagtgacaaaagtatacaattaaatagcctttagtatattcagagttgtatatccatcaacactaccaatttaataacattttcatcaacttaaaaaaaccctaccccctcatgttactctcaaactcttattagcacccaaaacatgcaaccatcatatggttttgtctctattggttttcctactctttcatacaaatggaatcatgcaatatgtggtctttcatgtctggcttctttcactgagcataacttgaggttcattcatgttgtggcatgtttcagtattacattcctttatatggttgagtgttattccactgttaggatataccacattttgtttaaggagataccacattttgtttatacattcttcagtttcaggacatttgggttgtttccattttttggctcttatgaccactgttgctatgaacatatgtgtaccacttttttttttttttttgggatggagtctcactctgtcacccagactggagtgcagtggtgtgatcttggcttattgcaacctccacttcctgggttcaagcgattctcctgcttcagcgtcctgagtacctgggactacaggtgcgcaccaccacacccagctaatttttgtattttttgtagagacagggttttgccatgttggccaggctggtctcaaactcctgacctcaggttatctgcctgcctcagcttcccaaagtgctggaacaacagtcctgagccaccacacctggccccagttttagtgttgtgtaaacacatgttgtcagttctcttgcataaataaccaggaatagaatgtctgggtcataaggaaactccacgtttcaacttttgaggaactgccaaactcttttccacagcagctgcactatttttacattcctaccagcaatgtgggaatactttttatttatctattaaattctagccatcctagtgggtgtgaagtggtatctcattgtagttttgatttgcacttgcctaatggctaattacattgaacattttccatgtgcttagtggttatttgtatatcttctttggagaaatgtctattcaaatccttttcccatttataaatagagttttttgtatttttgttgttgcattgtaagagctctttatatattgtgggtattagatacttattgtatgtatgatttccaaatatcttctcccattctatgattgtctttcactttcttgatagtgatgcacaaaagttttaaattttaatgaagtctaacatccaattttttcttttgttgcttatgatttttgtgtattacctaagaaactattgcctaattcacagccataaagattaatgcctatgtttccataagagttgtatagtttcagctcttacatttaggtctctggttggttttgagttaatttttgtgtatggtgtaagataaatgtcaaactttatcttttgcatgtggatattcaattgtctcagcactatttcttttttaaaaactttttttatttaaatgggtacatagtaggttatatatttatggggtatacaaggtattttgatacaggtatgcaatgtgtaatagtcacatcagggtaaatggggtatttatcacctcaagccttcagcctttgttataaataatccaattatactagttattttataatgtacaattatttttgactgtaatcaccctgttgtgctatcaactactaattcttattcattctattttttgtacccattaaccatctccactttccccctactacccttcccatccttggtaatcatcagagaagatatacagataataagaaagcatatgaaaagatgtttaacatcatttatcattagagaaatgagaatgattgactttagggttagggaagagaaatacaagataagactggaggattttgtagcggtagaaagtaagaaagtgctactccctcttccccacaaaatgacaggagtttgtcaaagggacacagatgtcaactgaaaaagttcccaatggccaacacaggaataatctgagcagtaaaataaacaacatagtattggattatacccaaagtataaaataggaatccatgaattcataatataaataattgaataaataggagataactgacaaatttctcatgcagaagaatgtagatactccaccgcaaggaggggaaatataactactcacttttttttcttttgagatggaattttgctcatcgcccaggctggagtgcaatggcaggatcactgcaatctctgcctcccaggttcaagcagttctcctgcctcagcctcctgaatagctgggattacaggcgtgcaccaccatgcctggctaatttttgtatttttagcagagacggggtttcaccatgtcggccaagctggtctcgaactcctgacctcaggtgatccacccactcagcctcccaaagtgctgggattacaggcgtgagccaccgtgcccaccaactactccctttttaggcatgggctgcacatagtgacttcccactaaacagtaaaatagggggaggggaaagaataactttacagggagaaacccatcaaatactacctcagccgggtgatcaaggttaacatcaacagtgatgagcaatgttgacagcatgtgccccggatatgatgtgatgacggtttttgtattttcccgttctaaaatttccatggggctattctttgtattttctattacttctctgagacttttaaactttccatttgaatagcagctttatagtcttgataattccaacatgtgtggcaacttacattctgcatctgttacattttttcccaacgtgagttgagattttcctggttcttcacctgccaattaatatcgattgtatcctggacattttgaatgtcattaggatgctctgggtcttggttaaatttggtggaggatgttgatatttatgttttaaagggtaattaacccatttgggttcaagtcataagttttgaccagccttctgagggttgtggttccaatgtcagttcagttttcaaagcctttgtagtactcttctgataggtcccacatgggtggcacctaaagtgtaacccagggtccttgggttttgggtacgcactgtgaaaaagttacacacttgtaactgttacatcttgaatttttgttttaaaaagttccaggaagaagcttagcccaggaaaaacaaagaccagttggacccagagatgcctgagttggagatgaactttggccaactttcctcatcaccatacttaaaatcctgtccaaggaggagcttattcaccattttctatacatgtgacatatgtagcagcataaccgacaactgggactgcgctgccttgactccacctctacatacaatgactcagctaaccagactaataaaagccatgtttgcaccattgctcagggaggcattgctttggggaattattcccagtgtcctccttacttatcgcaagtaataaaatccccctgggaaatcctc

SEQ ID NO: 39 - DNA, 3967 bp, Homo sapiens
gcggatccccgagcccagcattcggctccgcgcgctcggccctggcctcgcaggctgccgcgccggagcgccaggtgcccgctgaagtagcaggaacagagccggtgttcggaccctcccctggcccccaacctgcggcggagagcggcgctgagacttctcctgggcgggcgagcgctggaggacctgcaggctgccaccccgccccgcccctcgtcccggcgtccgcgggatccagacccgaaccccggacggcgcccgaggttcgtgccctctctctagaccgcgccaactgccccatcggtcgggacgcgcttggatttctttccccatttcttctcttttaagtacaataaaaggaaagggggattcgaggattttttaaaaaattgcttctttaattgggaggcaattcactcccattctggaagtgcggcccggggaggggccaggagcgggaacgtgcccggtgctgcccagtctttgtctgctgcctccggatgcacagcgatgggggaatggaccatcttggagaggctgctagaagccgcggtgcagcagcactccactatgatcgggaggtaagggcgccaagccggcggtcagggggccccgtcgggcggcccccgggagtcccttctcacacctggactgagtctcccgctccaatccccagtccgtcctctgcctcctccccatcgtcctaggtcaaggctccggtgttcccggcgatgagggattacccgacgccccgcgatgcccccctcctctagctactcctaaccagctgcccatcccttccccatcaagcaccactggggcttcactcttcccacatcagaaaaggagccgctggctcagtcttggtccctccactctccagagtcagagccaatctccatttggttccctaaatagaatctacaaagaaggcaggattgcatttggacagaaaagggcaaatggggagatggatttgctcttcagagcagatgcctcttttctcaacaaataattactaaaccaaacttatttggcggtgtaaacttaccgagcctacacacccaattgccatttttgggtctgtatctatatctatgtctctatctacctagctttatatatatatgagttcaatatatatgaatatatattcatagccatctgcttatataaagcattaaatttaatattcatgttgagaataaactaaatatacacatggagtagttatttacacaccctgtgtgtagacctcgaagcatgcaccatctgtaaaggtattctgtgtgcatttgccatatccagagtgaaggtgtgttttgtgtttctatacattctatatagagagatgaaatctatctgttgcaagtagactatgtccagtgtatggagatgtgtgtacctgggatctctataatatgaaatattcccagcctaccagcactcagcagaaaaggaagagacaaaaagctttcccagattcctagttcagtaccagcccgggatggacagctccccagtcaaaagactggtaaacaccagcaaagggaagggaggagcaggggtttcctgtcagtgacgcagcccgtgagaacctctctccctccctcttcctccgttcaggatcctgttgactgtggtggtgatcttccggatcctcattgtggccattgtgggggagacggtgtacgatgatgagcagaccatgtttgtgtgcaacaccctgcagcccggctgtaaccaggcctgctatgaccgcgccttccccatctcccacatacgttactgggtcttccagatcataatggtgtgtacccccagtctttgcttcatcacctactctgtgcaccagtccgccaagcagcgagaacgccgctactctacagtcttcctagccctggacagagacccccctgagtccataggaggtcctggaggaactgggggtgggggcagtggtgggggcaaacgagaagataagaagttgcaaaatgctattgtgaatggggtgctgcagaacacagagaacaccagtaaggagacagagccagattgtttagaggttaaggagctgactccacacccatcaggtctacgcactgcatcaaaatccaagctcagaaggcaggaaggcatctcccgcttctacattatccaagtggtgttccgaaatgccctggaaattgggttcctggttggccaatattttctctatggctttagtgtcccagggttgtatgagtgtaaccgctacccctgcatcaaggaggtggaatgttatgtgtcccggccaactgagaagactgtctttctagtgttcatgtttgctgtaagtggcatctgtgttgtgctcaacctggctgaactcaaccacctgggatggcgcaagatcaagctggctgtgcgaggggctcaggccaagagaaagtcaatctatgagattcgtaacaaggacctgccaagggtcagtgttcccaattttggcaggactcagtccagtgactctgcctatgtgtgagagggcaggtttcatgaaggtctgggggatggcaaggagccccaaggcagatgactgctcagacgtggctgtatccaccctcatttatgtgaccctcaccattaagatgtaggataagactggataaaagaagattttgcaccaatgggaaaggaggaaaagtggacccattttcacatatcacctaattggttctacagagacgattgggtagagtgatgaaatggatcaattagacttctttggtccctttctgtttatggcctagcctgatcctgataacactgaacttgcacagctaccaagtaggacttagccctgctgagctctttattctggtgaatggtgtgagttgagtacttcattgatataaaatttgtgacctatctcaacccatccctttatcctgagccatgggacaaacatccttgaggcactcttcatgtatctcccccaccagcatgcccctttccctcaatccaaaatagcatgccagctttttttttttttttttttttttttccagaatctggccttacattagacctaatatgttttatttgcaaacttagagggaattacatggggtgcttattggagaacggccatggcagaggttttcattagagccccatctgactggcccttagtcgtgatgaaaaccttaggaatgtctcaatatttccagttttctaactcaaactgcactggtgctgtttactagggatgggggatgggtgggagggagggaattgcaatatgcaactacaacacttttgtgagattgttgttgcacagttaggcacacggttacgagcttcaggatatttctgccttccagcttgtggactttggttaacattaaaaagattttttttggctaatatcaagagtgtctagctgagccacagcatttgtaactggtgtatctcactcattttcttacatagttttgttgtgcaacacagctgcacggtcattttgccatgatttgaatttacctgtgtgcttacaccagagaccttaatcatcccatgtcaatcctgatttattattttttcagttactctttgaaacacacacacatatacagacacacatacaaaattactggcttaaaagacctgcaactaaacactattggctaacgtgtgtttacggtgacttatttgagacatataccaaaggttcaaaaacctattgcattggactgtcaatatgttttcttctttttgctcttatttatttaagtgccatactgtacctttcatatccactgtgtatttagttaaaatattggccaagagaaacatctgggtaatgtgcttttatgaagccctttgttccctttgaattatcattatcatttttgatttagatatggacatggtgtaacacacaactaaggatttgtttaaaataaagttcttgcctttttttgtaaaa

SEQ ID NO: 40 - DNA, 4086 bp, Homo sapiens
agccatcctgtcctgtcctccatcctggccaaatccgaaagggaaaatgaaagagggagcaggaggcgccggtcccagccacctcccaaggtccctggctcagctctgacaccccagtcccggccccagggtgagtggggttgggtggcggtttaggggcaccaggggcgtgtggggacctgtgtaagtgtggggtggggaggatctcaggagatgtggaggctggaggcacaggaggccagggaggagggagaagcctggcgtcgcactcccaccacgctggggtaggagggcagggacacctccgacaaaggaccctgtgagagttatgaaagcggagttgcctctgtaccagccccccaccctgagaggagttcactgcagtaaaaatggtgagagaaatggtgggccaagaaaggagtggtctcgctgcctctgccactcccactcctcccatgggcaccaaattgggtctagcgtctcgggttcgaggctccactcttcccacagcatccttgacagctaagggcaccgctgggtttccgcttccgaaaccaggcaagtcaggggctggtccagctgatctccaaggtccttcctaagaatctgggatctggaggatcccagggtcgaacggagacggctcagggggtgcggctaaaatgcaaatgggggatcctccccagcacccatcggtcccaaagagaaggtaacccatagctgagcgtcgcctgctcccctcgggccctcccgtggccctccgtttcatactggtctcatcgctaaacccgggcctctcctacctcacgactcaccctgaagtcagagaaggtccaacggaccccaccccgataggcttggaaggggcaggggtccctgacttgccccatcccctgactccccgccccgcgtccccagcgccatgggggagtgggcgttcctgggctcgctgctggacgccgtgcagctgcagtcgccgctcgtgggccgcctctggctggtggtcatgctgatcttccgcatcctggtgctggccacggtgggcggcgccgtgttcgaggacgagcaagaggagttcgtgtgcaacacgctgcagccgggctgtcgccagacctgctacgaccgcgccttcccggtctcccactaccgcttctggctcttccacatcctgctgctctcggcgcccccggtgctgttcgtcgtctactccatgcaccgggcaggcaaggaggcgggcggcgctgaggcggcggcgcagtgcgcccccggactgcccgaggcccagtgcgcgccgtgcgccctgcgcgcccgccgcgcgcgccgctgctacctgctgagcgtggcgctgcgcctgctggccgagctgaccttcctgggcggccaggcgctgctctacggcttccgcgtggccccgcacttcgcgtgcgccggtccgccctgcccgcacacggtcgactgcttcgtgagccggcccaccgagaagaccgtcttcgtgctcttctatttcgcggtggggctgctgtcggcgctgctcagcgtagccgagctgggccacctgctctggaagggccgcccgcgcgccggggagcgtgacaaccgctgcaaccgtgcacacgaagaggcgcagaagctgctcccgccgccgccgccgccacctccgccaccggccctgccctcccggcgccccggccccgagccgtgcgccccgccggcctatgcgcacccggcgccggccagcctccgcgagtgcggcagcggccgcggcaaggcgtcaccggccaccggccgccgagatctggccatctaggggcgggcaccgcctcgcgcggactggacggcgagggccggaccccgccacctccgcccgcaccgcagaagccggaagctgcttccaccagagctgtcgcgggacctgccccggcaggagacgcgttgtggggacggcccgcgggcggcatcgcacttgcctcgtactgcctcccagtggctgccggcggcacctggggcaggccgggctgggggcggagaatgaactcaggcaggtcctggatgccaccacccaggtggaaaggaaggagaccaggaccctgagagagagtggacccgagggggagaacagagcggaaggtggagagtggttgttttactggggacaaaaacaactgtgatgccagcattctcaggcactctctgtgttcagagagagagtggtccccctgtgggctctctgcgagtgtgcatacacggacacataagcactgtgagctgtgtgcacgcgcacctgtacaccctgtgtgagcgctgtgcatgtgcgcgcatgtgtacaccctgcgtgaggcccacttgtgcacacagacacacgtaaccctcccgggtgagctgtgtgcacatgcacacagaaacatatgccccttgagagctgtgtactcacatccctgtgagctttgtgtgagtgcattgtgcacacacgcacatgtccattctgtgtgggctgcgtgtgcacacctgtacacagaaacatccttgtgcgctatgtgtgcatgtgtacatccggcgtgacctctgtgtgtgcacgcgtgtgtgtgtgatctctgatatgcactgcgggggtggccaggatccgatgccagctgcagccacaatggctccctccctaccaccctaacccagcccacctgccagggcatcacaggaggtctgtccccccctcccaagagaccccgcccagggagggaagaggaggagaggctccctttccccgggcaggcctcaatcctcgggagcctatgagcaacatcctcacagtaccccttgtggcgaggcgggggctgggcgctttcatggaggtggggtgggggtgggcggcgggccagagggcaacccagacgtgtgttatgcctccctcctccatcttcatcctccccgccgctactgctcccccaggctataaacgggaaagtcccttctgtcctcaggagaaagctcccaaaacacacgcgctcccggccctgccttcccttccaaccacccccttcttcctacttgcgggcattcgaagagctgctgcctatgcagcgcatccccctcctgtgtctcccctcccgtctgccctcccccttcaccagccagtgggctgctctccataagatcacccaggacctaagcgagaaatccaggggccgtcatcggactgcaccttgcgggcctcaccgcatcctgcctaccaggctgtgcgttccccgccatcaccccaccctgtccttctgagttcctggcgtctttctcagctctcctgtgccccacacagcagtgggaggtgtttctgaatagcgccccccacttaaacccgggactgagggcagcacccctgccctcagggtgagtcaagcgccttcacaaagcttccttctgaagccctgcccctgtcaggccttcgactccacagcaccggcttccaggtgtgctcagaaccatagggaattttctcttctaacaagcaccagacctgcttgctgccaagcgtttgaacgtgctgttcctttgcccagagtagccgctgcttcctgcagccttctcctcccctagctaatgcccacccacctattgttgtcacttgggaagaaaacagacaccttcaaggagagggctcccctggtagcccccaccccaagacagagctggatgcccctcgcttccgtagggaaagcacttctcctgcaggatggcattgctctctccccttccatggcacgtagtatgtgctcagtaaatatgtgttggatgagaaactgaaggtgtccccaggcctacaccactgccatgcccgaacactatccatgctatggtgggcaccatctctctgatgacagttctgtgtccacaacccagacccctccacacaaacccagatggggctgtgccgctgttttccagatgtattcattcaacaaatatttgtagggtacctactgtgtgtcagaagatgttcaagatcagcatcatccgatggaaatagcatatgagccatgtatgtagtttcaagtttttcattagccacattaaaaaagtaaaaggaaacaaatgaaa

SEQ ID NO: 41 - DNA, 3595 bp, Homo sapiens
ggtcactgcagttgtcaggaatgtttcgcctcagaggcaaacggcttagggccgtctcaacttggagacagaaaaacccacctcctactcctggctcagacctttgctttcttatctccagctcacacctttaagtcttatgtagttaaaggacatttatccgcctccttggagaacacagccctccagtgtctcctgcagcctggagcctgggacattctggaagcatggaaggcgtggacttgctagggtttctcatcatcacattaaactgcaacgtgaccatggtgggtgagtattgggaccatctccaaactcctgcgctgtttttatttccactgccatggtggaattgagtccttaaagggtccaggtatttactcattttcagtgtgcaagcaccaagctgaaagtccacccactcccaaaagaaagggctgtgcctttctggagggaagagagctgaggcttctagtttctttgaatggttccgcggttcctccgtcatgtaagggagtcttgcgtttgacattgttctctcacagatcatcctgtgctgacactggggtgctgactccaaagaccaaagcaggtggaggggtgtttgtgtgcaaccctggtgtggctacgttaccaggaaaaggaacagaacaacaaatgttaatcagaaggtgatacctttaggttttattctggaagcttggttttttttttttgtttttggagacagagtctcactctgttgcccaggctggagtgcagtgatgcaatctcagctcactgcaacctctgcctcccgggttcaagtgattctcctgcctcagcctcccgagtagctgggactacaggcgcctgccaccacgcccagctaattttctgtgtttttagtagagacggggtttcaccgtgttagccaggatggtctcgatctcctgacctcgtgagccacccgccttggcttcccaaagtgctgggattacaggcgtgagttaccacgcctggcctggaagcttaatttttaaggagtagccatttctcttgtgcactttaaaccaaatcccaagtttagttattttttttaacaaagaaaataatagatttttgtttaatgcagacgactcacattttcagagaggtatgggggtcagaaaaggatgaatatatgccggagatgcagttgatacttttctggctcattattttgtagatttagacaaaaccaacttgatgttaaaagttcaactcaatgactcatcacataatgatattattctttgtttgactgtctttacatatttatttttgttttgtttttatgatgtcaggcgatgtttctctcatcacaaaacacaatattcacaagttattttggctgagttttaaacatgtttcgaaacagttggccggtgccatgaaaatagggcttgacagttattttggttttctagcttggtgtcattccttcacgatacattgaagaaagacaagccccattcattcctaataactggaaaaggggaagaggaattctgaatgattaaaaaatctgaaaaatggaatgttcataaagaaattcaatttcaagggccgtagactaacattaaatacaagccctgtgattaaatagagatccctggactgttgtcataagtaagatttactgaaatcagcagctcgaattggcagttacagaaatacaccaacctcttttaaaaggcttattctcctaagaagaaaatttaaatcttatttaaatcattaatttgctcagccaaactttctttctggacctatcagtccaggagacattaccaaaagtctgaattagcagacagattaaaacacttttaatataatgctttttaaaaatctactcatcttgaagcatcttacaaacaaggatgttcagtgctcagtaaatatttgtcaaatgaactacctgatgctgtgagtaaagacaagctgacaggtgtggtggctcatgcctgtaatcccagctactcaagaggccaaggcggcaggagcacttgaggccaggagttcaagaccagcctgggcaatatagcacgaccctgtgtccaacaacaacaacaacgacaacacaaacaaacagaaaactaaagacatgcttattgacgtttcaatttcccaatctcagccccaatagacactttaaagctgttactcagggcagtgtattcggggtgatgaggccatgcccgcttcctctcttccaggaaagctctggttcgtcctcacgatgctgctgcggatgctggtgattgtcttggcggggcgacccgtctaccaggacgagcaggagaggtttgtctgcaacacgctgcagccgggatgcgccaatgtttgctacgacgtcttctcccccgtgtctcacctgcggttctggctgatccagggcgtgtgcgtcctcctcccctccgccgtcttcagcgtctatgtcctgcaccgaggagccacgctcgccgcgctgggcccccgccgctgccccgacccccgggagccggcctccgggcagagacgctgcccgcggccattcggggagcgcggcggcctccaggtgcccgacttttcggccggctacatcatccacctcctcctccggaccctgctggaggcagccttcggggccttgcactactttctctttggattcctggccccgaagaagttcccttgcacgcgccctccgtgcacgggcgtggtggactgctacgtgtcgcggcccacagagaagtccctgctgatgctgttcctctgggcggtcagcgcgctgtcttttctgctgggcctcgccgacctggtctgcagcctgcggcggcggatgcgcaggaggccgggaccccccacaagcccctccatccggaagcagagcggagcctcaggccacgcggagggacgccggactgacgaggagggtgggcgggaggaagagggggcaccggcgcccccgggtgcacgcgccggaggggagggggctggcagccccaggcgtacatccagggtgtcagggcacacgaagattccggatgaggatgagagtgaggtgacatcctccgccagcgaaaagctgggcagacagccccggggcaggccccaccgagaggccgcccaggaccccaggggctcaggatccgaggagcagccctcagcagcccccagccgcctggccgcgcccccttcctgcagcagcctgcagccccctgacccgcctgccagctccagtggtgctccccacctgagagccaggaagtctgagtgggtgtgaaaaaaacagcacctggcggtgccccggggctcacgcctgtaatcccaacactttgggaggcccaggcaggaggatcgtttgagaatatatctccttgcccaagagtttgagaccagcctggacaacataatgagaccctcgtctctacaaaatatctaaaaattagctgggcacagtggctccctcctgtagtcccagctacttgggaggctgagatgggaggaccatttgagcctgggagatcgaggctgcagtgagccaagatcacggcactgcgctgcagcctgggcaacacagtgagaccctgtc

SEQ ID NO: 42 - DNA, 2434 bp, Homo sapiens
tgctctctgcttttgtttctttgtttttgttttgttttgggacagagataggaaggttgaatggggccccagagatctaagagtaaaggaggaggggagagaaatttgtagtgatgagtgttttctgctgtaagagtcctgagagaatgtaagagtttgattctggcagaagcaaactggcaatgtgggtcaagaattaaccaacaggaatgccaggataacatctcctgagacatgtctctaaattacatcaaaaacttctatgaaggatgtgtaagtattatacaaacaaaaaatcaattgtatgagtcttttctgagtattttaccctgaattgcataagtcttggtgaataaattctctacatctatggagaatactgttaagtgtcaaccatatacttcaaaatattctgaatttaaaactataaagagaaaaattcaggaagtgtctttagatgttggtgttttagtgtggctcactctctcaattccctaattaagaagcagaggaaaaaagctttaactacaattaataaacattatttggttgttaagatagtgtacggactgagcttactactggattttttatctaattttcaaaaagaagtattagatattctgattttatttcaaagggattataatggtggggatattaattgaattcaaagctgtataaatatttccaaaattacacatttgattagccacatgtccctatcaactattgcttttcatattttaagagtgagaaatctcataatgcaggaattatatttgatttgatgatctctaagggtctatttggcttcaaaacttcttgactcttacattttttaaatgtgatataaggatttttttaaatgtcctcctttaatgtttgtgtttaaaagattttttttctcctaaaaccataacaggttaaacctccaactgtgattggtcaattccacacccttttctttggatcgatccgaatattcttcctcggggtgctaggctttgcagtttatgggaatgaggccttgcacttcatttgcgatccagacaaaagagaagtaaacctcttctgttacaatcagttcaggccaatcactccacaagtaagtttttctgtgtgcacataaacattaactctacaacaaactcattttctctttaaatgtaaaataatgtcataatatgagaaataccctaacaggttttttgttcctaaggattatgttactttttctttaattagctgtatatttcagataaattgagttttggggagtttcttccaattctggcattttattatctactaatgttatcattattctccagatctatatttgggatatagactagctgtctaataaaataaactacttcatcattatcagtcattgagaggcaattacagtaatatatgactatgttttcacaataaatatgttcaacattactaccttcattatattaagacacatataagatttttatgaaacttggaatttttaaattagactctgttgagagttagtggggtttttttagtgtattttagttacatattgattaattgatttactaagatatttctgacatactttaggtgttctaggcattacaactagttattgtcctggttcctggagctcttttccacctttatgctgcatgtaaaagcatcaatcaagaatgcattcttcaaaagcctatctacactataatttatatactctctgttttattaagaattagtctagcggcaatagcattctggcttcagatttacctctttggtttccaagtaaaatctctttacctgtgtgatgctagatctcttggggaaaacatgattataagatgcatggttccagaacactttgaaaaaaccatttttctcattgcaataaatacatttacaacaattacaattttattatttgttgctgagatttttgagatcatatttagaagattatactttccattcagacaatgaccaaataattacctattgtcatgctgcagttatttatcatttttatttagttttatcttactcagtgagtacaatttcaaaacaaacttacttcaatgtgtctgaaatttttgtctactataaaatatagtgcctggttgtaaggtaaggattcttgaagaaatatttcattttaattttgatcacttttattagaaaatatacacagaactactgttaatttatttttaaacagtgcttttacagagttctctcacatacatgttaattgatcagtttttctgtggccagagaaacttttattgtctttttttacgaagtggaaaattgatgctcatgagggttaatttaggtggtcaaagtcataatccagatatttatatttccctttctgtggaactatacagttttaaatttgagggtgtaattattttgc

SEQ ID NO: 43 - DNA, 5323 bp, Artificial Sequence
  Synthetic
gtgtatcatatgccaagtacgccccctattgacgtcaatgacggtaaatggcccgcctggcattatgcccagtacatgaccttatgggactttcctacttggcagtacatctacgtattagtcatcgctattaccatggtgatgcggttttggcagtacatcaatgggcgtggatagcggtttgactcacggggatttccaagtctccaccccattgacgtcaatgggagtttgttttggcaccaaaatcaacgggactttccaaaatgtcgtaacaactccgccccattgacgcaaatgggcggtaggcgtgtacggtgggaggtctatataagcagagctggtttagtgaaccgtcagatccgctagcgctaccggactcagatctcgagctcatgagcttgaactatattaagaacttctacgagggatgcgtcaaacctcctacggtcataggccaattccacaccctcttcttcgggtccattcgcattttcttcttgggagtcctgggtttcgccgtttacgggaacgaagctcttcattttatttgcgaccccgataaacgggaggttaatcttttttgttataatcaattcagaccgataacgccacaagttagcttttccgctctgcaacttgtgatagtccttgtgcctggcgctcttttccacctctatgccgcttgtaaaagcatcaaccaggaatgtatccttcaaaagccgatctataccatcatatacatattgtctgttctcttgaggataagtcttgcagctattgctttttggttgcagatatatttgttcggtttccaggtgaaaagcctgtacctttgcgacgcgcggtcactgggtgaaaatatgataataagatgcatggtcccggagcattttgaaaagacaatttttttgatcgcaatcaataccttcactacgattacgatactgcttttcgtagcagagatttttgagataatattccgaagactttactttccctttagacagggaggttcaggcggtgatccaccggtcgccaccatggtgagcaagggcgaggagctgttcaccggggtggtgcccatcctggtcgagctggacggcgacgtaaacggccacaagttcagcgtgtccggcgagggcgagggcgatgccacctacggcaagctgaccctgaagttcatctgcaccaccggcaagctgcccgtgccctggcccaccctcgtgaccaccttgacctacggcgtgcagtgcttcgcccgctaccccgaccacatgaagcagcacgacttcttcaagtccgccatgcccgaaggctacgtccaggagcgcaccatcttcttcaaggacgacggcaactacaagacccgcgccgaggtgaagttcgagggcgacaccctggtgaaccgcatcgagctgaagggcatcgacttcaaggaggacggcaacatcctggggcacaagctggagtacaactacaacagccacaaggtctatatcaccgccgacaagcagaagaacggcatcaaggtgaacttcaagacccgccacaacatcgaggacggcagcgtgcagctcgccgaccactaccagcagaacacccccatcggcgacggccccgtgctgctgcccgacaaccactacctgagcacccagtccaagctgagcaaagaccccaacgagaagcgcgatcacatggtcctgctggagttcgtgaccgccgccgggatcactctcggcatggacgagctgtacaagtaagcggccgcgactctagatcataatcagccataccacatttgtagaggttttacttgctttaaaaaacctcccacacctccccctgaacctgaaacataaaatgaatgcaattgttgttgttaacttgtttattgcagcttataatggttacaaataaagcaatagcatcacaaatttcacaaataaagcatttttttcactgcattctagttgtggtttgtccaaactcatcaatgtatcttaaggcgtaaattgtaagcgttaatattttgttaaaattcgcgttaaatttttgttaaatcagctcattttttaaccaataggccgaaatcggcaaaatcccttataaatcaaaagaatagaccgagatagggttgagtgttgttccagtttggaacaagagtccactattaaagaacgtggactccaacgtcaaagggcgaaaaaccgtctatcagggcgatggcccactacgtgaaccatcaccctaatcaagttttttggggtcgaggtgccgtaaagcactaaatcggaaccctaaagggagcccccgatttagagcttgacggggaaagccggcgaacgtggcgagaaaggaagggaagaaagcgaaaggagcgggcgctagggcgctggcaagtgtagcggtcacgctgcgcgtaaccaccacacccgccgcgcttaatgcgccgctacagggcgcgtcaggtggcacttttcggggaaatgtgcgcggaacccctatttgtttatttttctaaatacattcaaatatgtatccgctcatgagacaataaccctgataaatgcttcaataatattgaaaaaggaagagtcctgaggcggaaagaaccagctgtggaatgtgtgtcagttagggtgtggaaagtccccaggctccccagcaggcagaagtatgcaaagcatgcatctcaattagtcagcaaccaggtgtggaaagtccccaggctccccagcaggcagaagtatgcaaagcatgcatctcaattagtcagcaaccatagtcccgcccctaactccgcccatcccgcccctaactccgcccagttccgcccattctccgccccatggctgactaattttttttatttatgcagaggccgaggccgcctcggcctctgagctattccagaagtagtgaggaggcttttttggaggcctaggcttttgcaaagatcgatcaagagacaggatgaggatcgtttcgcatgattgaacaagatggattgcacgcaggttctccggccgcttgggtggagaggctattcggctatgactgggcacaacagacaatcggctgctctgatgccgccgtgttccggctgtcagcgcaggggcgcccggttctttttgtcaagaccgacctgtccggtgccctgaatgaactgcaagacgaggcagcgcggctatcgtggctggccacgacgggcgttccttgcgcagctgtgctcgacgttgtcactgaagcgggaagggactggctgctattgggcgaagtgccggggcaggatctcctgtcatctcaccttgctcctgccgagaaagtatccatcatggctgatgcaatgcggcggctgcatacgcttgatccggctacctgcccattcgaccaccaagcgaaacatcgcatcgagcgagcacgtactcggatggaagccggtcttgtcgatcaggatgatctggacgaagagcatcaggggctcgcgccagccgaactgttcgccaggctcaaggcgagcatgcccgacggcgaggatctcgtcgtgacccatggcgatgcctgcttgccgaatatcatggtggaaaatggccgcttttctggattcatcgactgtggccggctgggtgtggcggaccgctatcaggacatagcgttggctacccgtgatattgctgaagagcttggcggcgaatgggctgaccgcttcctcgtgctttacggtatcgccgctcccgattcgcagcgcatcgccttctatcgccttcttgacgagttcttctgagcgggactctggggttcgaaatgaccgaccaagcgacgcccaacctgccatcacgagatttcgattccaccgccgccttctatgaaaggttgggcttcggaatcgttttccgggacgccggctggatgatcctccagcgcggggatctcatgctggagttcttcgcccaccctagggggaggctaactgaaacacggaaggagacaataccggaaggaacccgcgctatgacggcaataaaaagacagaataaaacgcacggtgttgggtcgtttgttcataaacgcggggttcggtcccagggctggcactctgtcgataccccaccgagaccccattggggccaatacgcccgcgtttcttccttttccccaccccaccccccaagttcgggtgaaggcccagggctcgcagccaacgtcggggcggcaggccctgccatagcctcaggttactcatatatactttagattgatttaaaacttcatttttaatttaaaaggatctaggtgaagatcctttttgataatctcatgaccaaaatcccttaacgtgagttttcgttccactgagcgtcagaccccgtagaaaagatcaaaggatcttcttgagatcctttttttctgcgcgtaatctgctgcttgcaaacaaaaaaaccaccgctaccagcggtggtttgtttgccggatcaagagctaccaactctttttccgaaggtaactggcttcagcagagcgcagataccaaatactgttcttctagtgtagccgtagttaggccaccacttcaagaactctgtagcaccgcctacatacctcgctctgctaatcctgttaccagtggctgctgccagtggcgataagtcgtgtcttaccgggttggactcaagacgatagttaccggataaggcgcagcggtcgggctgaacggggggttcgtgcacacagcccagcttggagcgaacgacctacaccgaactgagatacctacagcgtgagctatgagaaagcgccacgcttcccgaagggagaaaggcggacaggtatccggtaagcggcagggtcggaacaggagagcgcacgagggagcttccagggggaaacgcctggtatctttatagtcctgtcgggtttcgccacctctgacttgagcgtcgatttttgtgatgctcgtcaggggggcggagcctatggaaaaacgccagcaacgcggcctttttacggttcctggccttttgctggccttttgctcacatgttctttcctgcgttatcccctgattctgtggataaccgtattaccgccatgcattagttattaatagtaatcaattacggggtcattagttcatagcccatatatggagttccgcgttacataacttacggtaaatggcccgcctggctgaccgcccaacgacccccgcccattgacgtcaataatgacgtatgttcccatagtaacgccaatagggactttccattgacgtcaatgggtggagtatttacggtaaactgcccacttggcagtacatcaa

SEQ ID NO: 44 - DNA, 5378 bp, Artificial Sequence
  Synthetic
gtgtatcatatgccaagtacgccccctattgacgtcaatgacggtaaatggcccgcctggcattatgcccagtacatgaccttatgggactttcctacttggcagtacatctacgtattagtcatcgctattaccatggtgatgcggttttggcagtacatcaatgggcgtggatagcggtttgactcacggggatttccaagtctccaccccattgacgtcaatgggagtttgttttggcaccaaaatcaacgggactttccaaaatgtcgtaacaactccgccccattgacgcaaatgggcggtaggcgtgtacggtgggaggtctatataagcagagctggtttagtgaaccgtcagatccgctagcgctaccggactcagatctcgagctcatgtcatggatgtttctgagggacctcctgtcaggtgttaataagtattcaaccggtacgggttggatctggctcgctgtagtcttcgtgtttaggctcctggtctatatggtcgcggcggagcatgtatggaaagatgaacagaaggagtttgaatgtaacagtcggcagcctggctgtaagaacgtgtgcttcgatgattttttccctatttcccaggtacggctttgggctctgcaactcattatggtgtccacgcctagcctgcttgtcgttctgcacgtcgcttatcatgaaggaagagagaaacggcatcggaagaaattgtatgtcagccccggaacaatggatggcggcttgtggtacgcttacctgataagcctgattgtgaagacaggttttgaaatagggtttttggttctcttttacaagctctacgacggtttttctgttccatatcttatcaaatgcgacttgaaaccatgccctaatactgtggactgctttatttccaagcctacagagaaaaccatcttcatattgttcctcgtaattacgagttgtttgtgcatagtcctgaatttcatcgagttgtcattcctggtactgaagtgcttcatcaagtgttgtttgcagaagtatctgaagaagcctcaggtactgtctgtaggaggttcaggcggtgatccaccggtcgccaccatggtgagcaagggcgaggagctgttcaccggggtggtgcccatcctggtcgagctggacggcgacgtaaacggccacaagttcagcgtgtccggcgagggcgagggcgatgccacctacggcaagctgaccctgaagttcatctgcaccaccggcaagctgcccgtgccctggcccaccctcgtgaccaccttgacctacggcgtgcagtgcttcgcccgctaccccgaccacatgaagcagcacgacttcttcaagtccgccatgcccgaaggctacgtccaggagcgcaccatcttcttcaaggacgacggcaactacaagacccgcgccgaggtgaagttcgagggcgacaccctggtgaaccgcatcgagctgaagggcatcgacttcaaggaggacggcaacatcctggggcacaagctggagtacaactacaacagccacaaggtctatatcaccgccgacaagcagaagaacggcatcaaggtgaacttcaagacccgccacaacatcgaggacggcagcgtgcagctcgccgaccactaccagcagaacacccccatcggcgacggccccgtgctgctgcccgacaaccactacctgagcacccagtccaagctgagcaaagaccccaacgagaagcgcgatcacatggtcctgctggagttcgtgaccgccgccgggatcactctcggcatggacgagctgtacaagtaaagcggccgcgactctagatcataatcagccataccacatttgtagaggttttacttgctttaaaaaacctcccacacctccccctgaacctgaaacataaaatgaatgcaattgttgttgttaacttgtttattgcagcttataatggttacaaataaagcaatagcatcacaaatttcacaaataaagcatttttttcactgcattctagttgtggtttgtccaaactcatcaatgtatcttaaggcgtaaattgtaagcgttaatattttgttaaaattcgcgttaaatttttgttaaatcagctcattttttaaccaataggccgaaatcggcaaaatcccttataaatcaaaagaatagaccgagatagggttgagtgttgttccagtttggaacaagagtccactattaaagaacgtggactccaacgtcaaagggcgaaaaaccgtctatcagggcgatggcccactacgtgaaccatcaccctaatcaagttttttggggtcgaggtgccgtaaagcactaaatcggaaccctaaagggagcccccgatttagagcttgacggggaaagccggcgaacgtggcgagaaaggaagggaagaaagcgaaaggagcgggcgctagggcgctggcaagtgtagcggtcacgctgcgcgtaaccaccacacccgccgcgcttaatgcgccgctacagggcgcgtcaggtggcacttttcggggaaatgtgcgcggaacccctatttgtttatttttctaaatacattcaaatatgtatccgctcatgagacaataaccctgataaatgcttcaataatattgaaaaaggaagagtcctgaggcggaaagaaccagctgtggaatgtgtgtcagttagggtgtggaaagtccccaggctccccagcaggcagaagtatgcaaagcatgcatctcaattagtcagcaaccaggtgtggaaagtccccaggctccccagcaggcagaagtatgcaaagcatgcatctcaattagtcagcaaccatagtcccgcccctaactccgcccatcccgcccctaactccgcccagttccgcccattctccgccccatggctgactaattttttttatttatgcagaggccgaggccgcctcggcctctgagctattccagaagtagtgaggaggcttttttggaggcctaggcttttgcaaagatcgatcaagagacaggatgaggatcgtttcgcatgattgaacaagatggattgcacgcaggttctccggccgcttgggtggagaggctattcggctatgactgggcacaacagacaatcggctgctctgatgccgccgtgttccggctgtcagcgcaggggcgcccggttctttttgtcaagaccgacctgtccggtgccctgaatgaactgcaagacgaggcagcgcggctatcgtggctggccacgacgggcgttccttgcgcagctgtgctcgacgttgtcactgaagcgggaagggactggctgctattgggcgaagtgccggggcaggatctcctgtcatctcaccttgctcctgccgagaaagtatccatcatggctgatgcaatgcggcggctgcatacgcttgatccggctacctgcccattcgaccaccaagcgaaacatcgcatcgagcgagcacgtactcggatggaagccggtcttgtcgatcaggatgatctggacgaagagcatcaggggctcgcgccagccgaactgttcgccaggctcaaggcgagcatgcccgacggcgaggatctcgtcgtgacccatggcgatgcctgcttgccgaatatcatggtggaaaatggccgcttttctggattcatcgactgtggccggctgggtgtggcggaccgctatcaggacatagcgttggctacccgtgatattgctgaagagcttggcggcgaatgggctgaccgcttcctcgtgctttacggtatcgccgctcccgattcgcagcgcatcgccttctatcgccttcttgacgagttcttctgagcgggactctggggttcgaaatgaccgaccaagcgacgcccaacctgccatcacgagatttcgattccaccgccgccttctatgaaaggttgggcttcggaatcgttttccgggacgccggctggatgatcctccagcgcggggatctcatgctggagttcttcgcccaccctagggggaggctaactgaaacacggaaggagacaataccggaaggaacccgcgctatgacggcaataaaaagacagaataaaacgcacggtgttgggtcgtttgttcataaacgcggggttcggtcccagggctggcactctgtcgataccccaccgagaccccattggggccaatacgcccgcgtttcttccttttccccaccccaccccccaagttcgggtgaaggcccagggctcgcagccaacgtcggggcggcaggccctgccatagcctcaggttactcatatatactttagattgatttaaaacttcatttttaatttaaaaggatctaggtgaagatcctttttgataatctcatgaccaaaatcccttaacgtgagttttcgttccactgagcgtcagaccccgtagaaaagatcaaaggatcttcttgagatcctttttttctgcgcgtaatctgctgcttgcaaacaaaaaaaccaccgctaccagcggtggtttgtttgccggatcaagagctaccaactctttttccgaaggtaactggcttcagcagagcgcagataccaaatactgttcttctagtgtagccgtagttaggccaccacttcaagaactctgtagcaccgcctacatacctcgctctgctaatcctgttaccagtggctgctgccagtggcgataagtcgtgtcttaccgggttggactcaagacgatagttaccggataaggcgcagcggtcgggctgaacggggggttcgtgcacacagcccagcttggagcgaacgacctacaccgaactgagatacctacagcgtgagctatgagaaagcgccacgcttcccgaagggagaaaggcggacaggtatccggtaagcggcagggtcggaacaggagagcgcacgagggagcttccagggggaaacgcctggtatctttatagtcctgtcgggtttcgccacctctgacttgagcgtcgatttttgtgatgctcgtcaggggggcggagcctatggaaaaacgccagcaacgcggcctttttacggttcctggccttttgctggccttttgctcacatgttctttcctgcgttatcccctgattctgtggataaccgtattaccgccatgcattagttattaatagtaatcaattacggggtcattagttcatagcccatatatggagttccgcgttacataacttacggtaaatggcccgcctggctgaccgcccaacgacccccgcccattgacgtcaataatgacgtatgttcccatagtaacgccaatagggactttccattgacgtcaatgggtggagtatttacggtaaactgcccacttggcagtacatcaa

SEQ ID NO: 45 - DNA, 5363 bp, Artificial Sequence
  Synthetic
atatatggagttccgcgttacataacttacggtaaatggcccgcctggctgaccgcccaacgacccccgcccattgacgtcaataatgacgtatgttcccatagtaacgccaatagggactttccattgacgtcaatgggtggagtatttacggtaaactgcccacttggcagtacatcaagtgtatcatatgccaagtacgccccctattgacgtcaatgacggtaaatggcccgcctggcattatgcccagtacatgaccttatgggactttcctacttggcagtacatctacgtattagtcatcgctattaccatggtgatgcggttttggcagtacatcaatgggcgtggatagcggtttgactcacggggatttccaagtctccaccccattgacgtcaatgggagtttgttttggcaccaaaatcaacgggactttccaaaatgtcgtaacaactccgccccattgacgcaaatgggcggtaggcgtgtacggtgggaggtctatataagcagagctggtttagtgaaccgtcagatccgctagcgctaccggactcagatcatggactggggcaccttgcaaacgatcttgggcggcgtcaataagcactctacatcaatcgggaagatatggcttacagtgttgtttatattcagaataatgatattggtggtcgccgcgaaagaggtatggggagatgagcaggcagactttgtatgtaacacattgcagccaggatgtaagaatgtatgctacgaccactactttccaatctcccacataaggctctgggctcttcagctcatctttgtttccacacccgcgttgctcgtggctatgcatgttgcctaccggcgacacgaaaaaaagagaaagttcataaagggtgaaatcaagagtgagttcaaggatatcgaggaaataaagactcagaaagttaggattgagggaagcctttggtggacttataccagttctatatttttccgagttattttcgaagcagccttcatgtacgtcttttatgtgatgtatgatgggttcagcatgcaacgactcgttaagtgtaatgcctggccgtgccccaatacagtggactgcttcgtttctcgacccaccgagaagacggtttttacagtctttatgattgccgtcagtggcatttgcatcctgctcaacgtgacagaattgtgttacttgctgattcggtattgctccgggaaaagcaagaaacctgttgatccaccggtcgccaccatggtgagcaagggcgaggagctgttcaccggggtggtgcccatcctggtcgagctggacggcgacgtaaacggccacaagttcagcgtgtccggcgagggcgagggcgatgccacctacggcaagctgaccctgaagttcatctgcaccaccggcaagctgcccgtgccctggcccaccctcgtgaccaccttgacctacggcgtgcagtgcttcgcccgctaccccgaccacatgaagcagcacgacttcttcaagtccgccatgcccgaaggctacgtccaggagcgcaccatcttcttcaaggacgacggcaactacaagacccgcgccgaggtgaagttcgagggcgacaccctggtgaaccgcatcgagctgaagggcatcgacttcaaggaggacggcaacatcctggggcacaagctggagtacaactacaacagccacaaggtctatatcaccgccgacaagcagaagaacggcatcaaggtgaacttcaagacccgccacaacatcgaggacggcagcgtgcagctcgccgaccactaccagcagaacacccccatcggcgacggccccgtgctgctgcccgacaaccactacctgagcacccagtccaagctgagcaaagaccccaacgagaagcgcgatcacatggtcctgctggagttcgtgaccgccgccgggatcactctcggcatggacgagctgtacaagtaagcggccgcgactctagatcataatcagccataccacatttgtagaggttttacttgctttaaaaaacctcccacacctccccctgaacctgaaacataaaatgaatgcaattgttgttgttaacttgtttattgcagcttataatggttacaaataaagcaatagcatcacaaatttcacaaataaagcatttttttcactgcattctagttgtggtttgtccaaactcatcaatgtatcttaaggcgtaaattgtaagcgttaatattttgttaaaattcgcgttaaatttttgttaaatcagctcattttttaaccaataggccgaaatcggcaaaatcccttataaatcaaaagaatagaccgagatagggttgagtgttgttccagtttggaacaagagtccactattaaagaacgtggactccaacgtcaaagggcgaaaaaccgtctatcagggcgatggcccactacgtgaaccatcaccctaatcaagttttttggggtcgaggtgccgtaaagcactaaatcggaaccctaaagggagcccccgatttagagcttgacggggaaagccggcgaacgtggcgagaaaggaagggaagaaagcgaaaggagcgggcgctagggcgctggcaagtgtagcggtcacgctgcgcgtaaccaccacacccgccgcgcttaatgcgccgctacagggcgcgtcaggtggcacttttcggggaaatgtgcgcggaacccctatttgtttatttttctaaatacattcaaatatgtatccgctcatgagacaataaccctgataaatgcttcaataatattgaaaaaggaagagtcctgaggcggaaagaaccagctgtggaatgtgtgtcagttagggtgtggaaagtccccaggctccccagcaggcagaagtatgcaaagcatgcatctcaattagtcagcaaccaggtgtggaaagtccccaggctccccagcaggcagaagtatgcaaagcatgcatctcaattagtcagcaaccatagtcccgcccctaactccgcccatcccgcccctaactccgcccagttccgcccattctccgccccatggctgactaattttttttatttatgcagaggccgaggccgcctcggcctctgagctattccagaagtagtgaggaggcttttttggaggcctaggcttttgcaaagatcgatcaagagacaggatgaggatcgtttcgcatgattgaacaagatggattgcacgcaggttctccggccgcttgggtggagaggctattcggctatgactgggcacaacagacaatcggctgctctgatgccgccgtgttccggctgtcagcgcaggggcgcccggttctttttgtcaagaccgacctgtccggtgccctgaatgaactgcaagacgaggcagcgcggctatcgtggctggccacgacgggcgttccttgcgcagctgtgctcgacgttgtcactgaagcgggaagggactggctgctattgggcgaagtgccggggcaggatctcctgtcatctcaccttgctcctgccgagaaagtatccatcatggctgatgcaatgcggcggctgcatacgcttgatccggctacctgcccattcgaccaccaagcgaaacatcgcatcgagcgagcacgtactcggatggaagccggtcttgtcgatcaggatgatctggacgaagagcatcaggggctcgcgccagccgaactgttcgccaggctcaaggcgagcatgcccgacggcgaggatctcgtcgtgacccatggcgatgcctgcttgccgaatatcatggtggaaaatggccgcttttctggattcatcgactgtggccggctgggtgtggcggaccgctatcaggacatagcgttggctacccgtgatattgctgaagagcttggcggcgaatgggctgaccgcttcctcgtgctttacggtatcgccgctcccgattcgcagcgcatcgccttctatcgccttcttgacgagttcttctgagcgggactctggggttcgaaatgaccgaccaagcgacgcccaacctgccatcacgagatttcgattccaccgccgccttctatgaaaggttgggcttcggaatcgttttccgggacgccggctggatgatcctccagcgcggggatctcatgctggagttcttcgcccaccctagggggaggctaactgaaacacggaaggagacaataccggaaggaacccgcgctatgacggcaataaaaagacagaataaaacgcacggtgttgggtcgtttgttcataaacgcggggttcggtcccagggctggcactctgtcgataccccaccgagaccccattggggccaatacgcccgcgtttcttccttttccccaccccaccccccaagttcgggtgaaggcccagggctcgcagccaacgtcggggcggcaggccctgccatagcctcaggttactcatatatactttagattgatttaaaacttcatttttaatttaaaaggatctaggtgaagatcctttttgataatctcatgaccaaaatcccttaacgtgagttttcgttccactgagcgtcagaccccgtagaaaagatcaaaggatcttcttgagatcctttttttctgcgcgtaatctgctgcttgcaaacaaaaaaaccaccgctaccagcggtggtttgtttgccggatcaagagctaccaactctttttccgaaggtaactggcttcagcagagcgcagataccaaatactgttcttctagtgtagccgtagttaggccaccacttcaagaactctgtagcaccgcctacatacctcgctctgctaatcctgttaccagtggctgctgccagtggcgataagtcgtgtcttaccgggttggactcaagacgatagttaccggataaggcgcagcggtcgggctgaacggggggttcgtgcacacagcccagcttggagcgaacgacctacaccgaactgagatacctacagcgtgagctatgagaaagcgccacgcttcccgaagggagaaaggcggacaggtatccggtaagcggcagggtcggaacaggagagcgcacgagggagcttccagggggaaacgcctggtatctttatagtcctgtcgggtttcgccacctctgacttgagcgtcgatttttgtgatgctcgtcaggggggcggagcctatggaaaaacgccagcaacgcggcctttttacggttcctggccttttgctggccttttgctcacatgttctttcctgcgttatcccctgattctgtggataaccgtattaccgccatgcattagttattaatagtaatcaattacggggtcattagttcatagccc

SEQ ID NO: 46 - DNA, 5491 bp, Artificial Sequence
  Synthetic
gtgtatcatatgccaagtacgccccctattgacgtcaatgacggtaaatggcccgcctggcattatgcccagtacatgaccttatgggactttcctacttggcagtacatctacgtattagtcatcgctattaccatggtgatgcggttttggcagtacatcaatgggcgtggatagcggtttgactcacggggatttccaagtctccaccccattgacgtcaatgggagtttgttttggcaccaaaatcaacgggactttccaaaatgtcgtaacaactccgccccattgacgcaaatgggcggtaggcgtgtacggtgggaggtctatataagcagagctggtttagtgaaccgtcagatccgctagcgctaccggactcagatctcgagctcatggattggggtacacttcataccttcattgggggagtgaataagcactcaacgagcataggcaaggtctggatcactgtcatttttatattccgcgtgatgattctcgttgtggcggctcaagaagtttggggggacgagcaggaagatttcgtgtgtaacacacttcagccgggttgtaaaaacgtgtgctacgatcactttttcccagtttcacacataaggctgtgggcgctgcaactcatctttgtgtccacgcccgccctgctcgtggcaatgcatgttgcatattacagacatgagactactcgaaagtttagacgcggtgagaagcggaatgactttaaggacatcgaagacattaagaagcaaaaggtaaggatcgaggggtcactctggtggacatatactagctcaatttttttcagaatcatctttgaggccgctttcatgtacgttttttactttctgtataacgggtaccatttgccctgggtactcaagtgtggtattgacccttgcccaaacctggtcgattgttttatctcacgccccacagaaaagacagttttcaccattttcatgatctcagcctcagtcatctgtatgttgttgaatgtagctgagctttgttatctgttgcttaaggtgtgtttcagaagaagcaagagagctcaaacacagaaaaaccaccccaatcacgctctgaaagagagcaaacagaatgagatgaatgaactgatatctgacagtggtcaaaacgctatcactggcttccccagcggaggttcaggcggtgatccaccggtcgccaccatggtgagcaagggcgaggagctgttcaccggggtggtgcccatcctggtcgagctggacggcgacgtaaacggccacaagttcagcgtgtccggcgagggcgagggcgatgccacctacggcaagctgaccctgaagttcatctgcaccaccggcaagctgcccgtgccctggcccaccctcgtgaccaccttgacctacggcgtgcagtgcttcgcccgctaccccgaccacatgaagcagcacgacttcttcaagtccgccatgcccgaaggctacgtccaggagcgcaccatcttcttcaaggacgacggcaactacaagacccgcgccgaggtgaagttcgagggcgacaccctggtgaaccgcatcgagctgaagggcatcgacttcaaggaggacggcaacatcctggggcacaagctggagtacaactacaacagccacaaggtctatatcaccgccgacaagcagaagaacggcatcaaggtgaacttcaagacccgccacaacatcgaggacggcagcgtgcagctcgccgaccactaccagcagaacacccccatcggcgacggccccgtgctgctgcccgacaaccactacctgagcacccagtccaagctgagcaaagaccccaacgagaagcgcgatcacatggtcctgctggagttcgtgaccgccgccgggatcactctcggcatggacgagctgtacaagtaagcggccgcgactctagatcataatcagccataccacatttgtagaggttttacttgctttaaaaaacctcccacacctccccctgaacctgaaacataaaatgaatgcaattgttgttgttaacttgtttattgcagcttataatggttacaaataaagcaatagcatcacaaatttcacaaataaagcatttttttcactgcattctagttgtggtttgtccaaactcatcaatgtatcttaaggcgtaaattgtaagcgttaatattttgttaaaattcgcgttaaatttttgttaaatcagctcattttttaaccaataggccgaaatcggcaaaatcccttataaatcaaaagaatagaccgagatagggttgagtgttgttccagtttggaacaagagtccactattaaagaacgtggactccaacgtcaaagggcgaaaaaccgtctatcagggcgatggcccactacgtgaaccatcaccctaatcaagttttttggggtcgaggtgccgtaaagcactaaatcggaaccctaaagggagcccccgatttagagcttgacggggaaagccggcgaacgtggcgagaaaggaagggaagaaagcgaaaggagcgggcgctagggcgctggcaagtgtagcggtcacgctgcgcgtaaccaccacacccgccgcgcttaatgcgccgctacagggcgcgtcaggtggcacttttcggggaaatgtgcgcggaacccctatttgtttatttttctaaatacattcaaatatgtatccgctcatgagacaataaccctgataaatgcttcaataatattgaaaaaggaagagtcctgaggcggaaagaaccagctgtggaatgtgtgtcagttagggtgtggaaagtccccaggctccccagcaggcagaagtatgcaaagcatgcatctcaattagtcagcaaccaggtgtggaaagtccccaggctccccagcaggcagaagtatgcaaagcatgcatctcaattagtcagcaaccatagtcccgcccctaactccgcccatcccgcccctaactccgcccagttccgcccattctccgccccatggctgactaattttttttatttatgcagaggccgaggccgcctcggcctctgagctattccagaagtagtgaggaggcttttttggaggcctaggcttttgcaaagatcgatcaagagacaggatgaggatcgtttcgcatgattgaacaagatggattgcacgcaggttctccggccgcttgggtggagaggctattcggctatgactgggcacaacagacaatcggctgctctgatgccgccgtgttccggctgtcagcgcaggggcgcccggttctttttgtcaagaccgacctgtccggtgccctgaatgaactgcaagacgaggcagcgcggctatcgtggctggccacgacgggcgttccttgcgcagctgtgctcgacgttgtcactgaagcgggaagggactggctgctattgggcgaagtgccggggcaggatctcctgtcatctcaccttgctcctgccgagaaagtatccatcatggctgatgcaatgcggcggctgcatacgcttgatccggctacctgcccattcgaccaccaagcgaaacatcgcatcgagcgagcacgtactcggatggaagccggtcttgtcgatcaggatgatctggacgaagagcatcaggggctcgcgccagccgaactgttcgccaggctcaaggcgagcatgcccgacggcgaggatctcgtcgtgacccatggcgatgcctgcttgccgaatatcatggtggaaaatggccgcttttctggattcatcgactgtggccggctgggtgtggcggaccgctatcaggacatagcgttggctacccgtgatattgctgaagagcttggcggcgaatgggctgaccgcttcctcgtgctttacggtatcgccgctcccgattcgcagcgcatcgccttctatcgccttcttgacgagttcttctgagcgggactctggggttcgaaatgaccgaccaagcgacgcccaacctgccatcacgagatttcgattccaccgccgccttctatgaaaggttgggcttcggaatcgttttccgggacgccggctggatgatcctccagcgcggggatctcatgctggagttcttcgcccaccctagggggaggctaactgaaacacggaaggagacaataccggaaggaacccgcgctatgacggcaataaaaagacagaataaaacgcacggtgttgggtcgtttgttcataaacgcggggttcggtcccagggctggcactctgtcgataccccaccgagaccccattggggccaatacgcccgcgtttcttccttttccccaccccaccccccaagttcgggtgaaggcccagggctcgcagccaacgtcggggcggcaggccctgccatagcctcaggttactcatatatactttagattgatttaaaacttcatttttaatttaaaaggatctaggtgaagatcctttttgataatctcatgaccaaaatcccttaacgtgagttttcgttccactgagcgtcagaccccgtagaaaagatcaaaggatcttcttgagatcctttttttctgcgcgtaatctgctgcttgcaaacaaaaaaaccaccgctaccagcggtggtttgtttgccggatcaagagctaccaactctttttccgaaggtaactggcttcagcagagcgcagataccaaatactgttcttctagtgtagccgtagttaggccaccacttcaagaactctgtagcaccgcctacatacctcgctctgctaatcctgttaccagtggctgctgccagtggcgataagtcgtgtcttaccgggttggactcaagacgatagttaccggataaggcgcagcggtcgggctgaacggggggttcgtgcacacagcccagcttggagcgaacgacctacaccgaactgagatacctacagcgtgagctatgagaaagcgccacgcttcccgaagggagaaaggcggacaggtatccggtaagcggcagggtcggaacaggagagcgcacgagggagcttccagggggaaacgcctggtatctttatagtcctgtcgggtttcgccacctctgacttgagcgtcgatttttgtgatgctcgtcaggggggcggagcctatggaaaaacgccagcaacgcggcctttttacggttcctggccttttgctggccttttgctcacatgttctttcctgcgttatcccctgattctgtggataaccgtattaccgccatgcattagttattaatagtaatcaattacggggtcattagttcatagcccatatatggagttccgcgttacataacttacggtaaatggcccgcctggctgaccgcccaacgacccccgcccattgacgtcaataatgacgtatgttcccatagtaacgccaatagggactttccattgacgtcaatgggtggagtatttacggtaaactgcccacttggcagtacatcaa

SEQ ID NO: 47 - DNA, 5507 bp, Artificial Sequence
  Synthetic
gtgtatcatatgccaagtacgccccctattgacgtcaatgacggtaaatggcccgcctggcattatgcccagtacatgaccttatgggactttcctacttggcagtacatctacgtattagtcatcgctattaccatggtgatgcggttttggcagtacatcaatgggcgtggatagcggtttgactcacggggatttccaagtctccaccccattgacgtcaatgggagtttgttttggcaccaaaatcaacgggactttccaaaatgtcgtaacaactccgccccattgacgcaaatgggcggtaggcgtgtacggtgggaggtctatataagcagagctggtttagtgaaccgtcagatccgctagcgctaccggactcagatctcgagctcatgaattgggcattcttgcaaggcttgctttctggtgtcaataagtattcaacggtgctgtccaggatatggctctctgttgtgttcatttttcgggttctggtatacgtggttgcggcagaggaagtgtgggatgacgaacagaaggacttcgtgtgcaacactaaacaaccgggctgtccgaatgtgtgctacgatgagttctttcccgtaagccacgtccgattgtgggcgctccagttgatcttggtaacatgtccctctctccttgtcgtgatgcacgtagcatatcgagaggaacgagaacggaagcaccaccttaaacacggcccaaatgcaccgtccttgtatgacaatcttagtaaaaaacgaggggggctttggtggacatacctcctctctctcatatttaaggcagccgttgacgccggattcctctatatttttcaccgactctacaaagactacgatatgccgcgcgtcgtggcctgcagtgtcgaaccctgccctcatactgttgattgctatatttctcgccccaccgagaagaaagtttttacatatttcatggtgaccacagcggcgatttgcatcttgctgaatctcagtgaggtgttctatctcgtcgggaagaggtgtatggaaatctttggacctagacatcgccgacccaggtgtagggaatgtttgcctgatacctgtcccccatacgtgttgtcccaaggcggacatccggaagacgggaactcagtattgatgaaggccggctcagcgccggtcgatgccggagggtacccgggaggttcaggcggtgatccaccggtcgccaccatggtgagcaagggcgaggagctgttcaccggggtggtgcccatcctggtcgagctggacggcgacgtaaacggccacaagttcagcgtgtccggcgagggcgagggcgatgccacctacggcaagctgaccctgaagttcatctgcaccaccggcaagctgcccgtgccctggcccaccctcgtgaccaccttgacctacggcgtgcagtgcttcgcccgctaccccgaccacatgaagcagcacgacttcttcaagtccgccatgcccgaaggctacgtccaggagcgcaccatcttcttcaaggacgacggcaactacaagacccgcgccgaggtgaagttcgagggcgacaccctggtgaaccgcatcgagctgaagggcatcgacttcaaggaggacggcaacatcctggggcacaagctggagtacaactacaacagccacaaggtctatatcaccgccgacaagcagaagaacggcatcaaggtgaacttcaagacccgccacaacatcgaggacggcagcgtgcagctcgccgaccactaccagcagaacacccccatcggcgacggccccgtgctgctgcccgacaaccactacctgagcacccagtccaagctgagcaaagaccccaacgagaagcgcgatcacatggtcctgctggagttcgtgaccgccgccgggatcactctcggcatggacgagctgtacaagtaaagcggccgcgactctagatcataatcagccataccacatttgtagaggttttacttgctttaaaaaacctcccacacctccccctgaacctgaaacataaaatgaatgcaattgttgttgttaacttgtttattgcagcttataatggttacaaataaagcaatagcatcacaaatttcacaaataaagcatttttttcactgcattctagttgtggtttgtccaaactcatcaatgtatcttaaggcgtaaattgtaagcgttaatattttgttaaaattcgcgttaaatttttgttaaatcagctcattttttaaccaataggccgaaatcggcaaaatcccttataaatcaaaagaatagaccgagatagggttgagtgttgttccagtttggaacaagagtccactattaaagaacgtggactccaacgtcaaagggcgaaaaaccgtctatcagggcgatggcccactacgtgaaccatcaccctaatcaagttttttggggtcgaggtgccgtaaagcactaaatcggaaccctaaagggagcccccgatttagagcttgacggggaaagccggcgaacgtggcgagaaaggaagggaagaaagcgaaaggagcgggcgctagggcgctggcaagtgtagcggtcacgctgcgcgtaaccaccacacccgccgcgcttaatgcgccgctacagggcgcgtcaggtggcacttttcggggaaatgtgcgcggaacccctatttgtttatttttctaaatacattcaaatatgtatccgctcatgagacaataaccctgataaatgcttcaataatattgaaaaaggaagagtcctgaggcggaaagaaccagctgtggaatgtgtgtcagttagggtgtggaaagtccccaggctccccagcaggcagaagtatgcaaagcatgcatctcaattagtcagcaaccaggtgtggaaagtccccaggctccccagcaggcagaagtatgcaaagcatgcatctcaattagtcagcaaccatagtcccgcccctaactccgcccatcccgcccctaactccgcccagttccgcccattctccgccccatggctgactaattttttttatttatgcagaggccgaggccgcctcggcctctgagctattccagaagtagtgaggaggcttttttggaggcctaggcttttgcaaagatcgatcaagagacaggatgaggatcgtttcgcatgattgaacaagatggattgcacgcaggttctccggccgcttgggtggagaggctattcggctatgactgggcacaacagacaatcggctgctctgatgccgccgtgttccggctgtcagcgcaggggcgcccggttctttttgtcaagaccgacctgtccggtgccctgaatgaactgcaagacgaggcagcgcggctatcgtggctggccacgacgggcgttccttgcgcagctgtgctcgacgttgtcactgaagcgggaagggactggctgctattgggcgaagtgccggggcaggatctcctgtcatctcaccttgctcctgccgagaaagtatccatcatggctgatgcaatgcggcggctgcatacgcttgatccggctacctgcccattcgaccaccaagcgaaacatcgcatcgagcgagcacgtactcggatggaagccggtcttgtcgatcaggatgatctggacgaagagcatcaggggctcgcgccagccgaactgttcgccaggctcaaggcgagcatgcccgacggcgaggatctcgtcgtgacccatggcgatgcctgcttgccgaatatcatggtggaaaatggccgcttttctggattcatcgactgtggccggctgggtgtggcggaccgctatcaggacatagcgttggctacccgtgatattgctgaagagcttggcggcgaatgggctgaccgcttcctcgtgctttacggtatcgccgctcccgattcgcagcgcatcgccttctatcgccttcttgacgagttcttctgagcgggactctggggttcgaaatgaccgaccaagcgacgcccaacctgccatcacgagatttcgattccaccgccgccttctatgaaaggttgggcttcggaatcgttttccgggacgccggctggatgatcctccagcgcggggatctcatgctggagttcttcgcccaccctagggggaggctaactgaaacacggaaggagacaataccggaaggaacccgcgctatgacggcaataaaaagacagaataaaacgcacggtgttgggtcgtttgttcataaacgcggggttcggtcccagggctggcactctgtcgataccccaccgagaccccattggggccaatacgcccgcgtttcttccttttccccaccccaccccccaagttcgggtgaaggcccagggctcgcagccaacgtcggggcggcaggccctgccatagcctcaggttactcatatatactttagattgatttaaaacttcatttttaatttaaaaggatctaggtgaagatcctttttgataatctcatgaccaaaatcccttaacgtgagttttcgttccactgagcgtcagaccccgtagaaaagatcaaaggatcttcttgagatcctttttttctgcgcgtaatctgctgcttgcaaacaaaaaaaccaccgctaccagcggtggtttgtttgccggatcaagagctaccaactctttttccgaaggtaactggcttcagcagagcgcagataccaaatactgttcttctagtgtagccgtagttaggccaccacttcaagaactctgtagcaccgcctacatacctcgctctgctaatcctgttaccagtggctgctgccagtggcgataagtcgtgtcttaccgggttggactcaagacgatagttaccggataaggcgcagcggtcgggctgaacggggggttcgtgcacacagcccagcttggagcgaacgacctacaccgaactgagatacctacagcgtgagctatgagaaagcgccacgcttcccgaagggagaaaggcggacaggtatccggtaagcggcagggtcggaacaggagagcgcacgagggagcttccagggggaaacgcctggtatctttatagtcctgtcgggtttcgccacctctgacttgagcgtcgatttttgtgatgctcgtcaggggggcggagcctatggaaaaacgccagcaacgcggcctttttacggttcctggccttttgctggccttttgctcacatgttctttcctgcgttatcccctgattctgtggataaccgtattaccgccatgcattagttattaatagtaatcaattacggggtcattagttcatagcccatatatggagttccgcgttacataacttacggtaaatggcccgcctggctgaccgcccaacgacccccgcccattgacgtcaataatgacgtatgttcccatagtaacgccaatagggactttccattgacgtcaatgggtggagtatttacggtaaactgcccacttggcagtacatcaa

SEQ ID NO: 48 - DNA, 5519 bp, Artificial Sequence
  Synthetic
gtgtatcatatgccaagtacgccccctattgacgtcaatgacggtaaatggcccgcctggcattatgcccagtacatgaccttatgggactttcctacttggcagtacatctacgtattagtcatcgctattaccatggtgatgcggttttggcagtacatcaatgggcgtggatagcggtttgactcacggggatttccaagtctccaccccattgacgtcaatgggagtttgttttggcaccaaaatcaacgggactttccaaaatgtcgtaacaactccgccccattgacgcaaatgggcggtaggcgtgtacggtgggaggtctatataagcagagctggtttagtgaaccgtcagatccgctagcgctaccggactcagatctcgagctcatggattggaagaccttgcaagcgctccttagcggcgtgaacaaatattcaactgcttttggaagaatttggctcagtgtcgtattcgtcttccgcgtgttggtgtacgtcgtagccgcagagcgcgtttggggtgatgagcaaaaagacttcgactgtaacacgaaacaacccggctgcacaaatgtttgctatgacaactatttccccatcagtaatataaggttgtgggcgctccagcttattttcgtgacctgtccctcacttctggttatcttgcatgtcgcgtaccgggaagaacgcgagcgccggcataggcaaaaacacggcgaccaatgtgcaaaactttacgacaacgccggcaagaaacatgggggcctctggtggacttatcttttttcattgatttttaaactcataatagagttcttgtttctgtatcttctccatactttgtggcatggattcaatatgccgcgccttgtgcaatgtgcaaacgtagcgccgtgccccaacatcgtcgactgttatatcgcccggcctacagagaaaaaaatatttacctacttcatggtgggtgcatcagctgtatgtatcgtcctgactatctgcgagctgtgttacctcatttgtcatcgggtcctccgcggtttgcataaagataaaccgcgcggaggctgctccccaagtagcagcgcgtcaagggcgtccacatgccgctgccaccataaacttgtggaggcaggagaggttgaccccgatcctggaaataacaaactccaagcctctgctcctaatttgacgcccattggaggttcaggcggtgatccaccggtcgccaccatggtgagcaagggcgaggagctgttcaccggggtggtgcccatcctggtcgagctggacggcgacgtaaacggccacaagttcagcgtgtccggcgagggcgagggcgatgccacctacggcaagctgaccctgaagttcatctgcaccaccggcaagctgcccgtgccctggcccaccctcgtgaccaccttgacctacggcgtgcagtgcttcgcccgctaccccgaccacatgaagcagcacgacttcttcaagtccgccatgcccgaaggctacgtccaggagcgcaccatcttcttcaaggacgacggcaactacaagacccgcgccgaggtgaagttcgagggcgacaccctggtgaaccgcatcgagctgaagggcatcgacttcaaggaggacggcaacatcctggggcacaagctggagtacaactacaacagccacaaggtctatatcaccgccgacaagcagaagaacggcatcaaggtgaacttcaagacccgccacaacatcgaggacggcagcgtgcagctcgccgaccactaccagcagaacacccccatcggcgacggccccgtgctgctgcccgacaaccactacctgagcacccagtccaagctgagcaaagaccccaacgagaagcgcgatcacatggtcctgctggagttcgtgaccgccgccgggatcactctcggcatggacgagctgtacaagtaaagcggccgcgactctagatcataatcagccataccacatttgtagaggttttacttgctttaaaaaacctcccacacctccccctgaacctgaaacataaaatgaatgcaattgttgttgttaacttgtttattgcagcttataatggttacaaataaagcaatagcatcacaaatttcacaaataaagcatttttttcactgcattctagttgtggtttgtccaaactcatcaatgtatcttaaggcgtaaattgtaagcgttaatattttgttaaaattcgcgttaaatttttgttaaatcagctcattttttaaccaataggccgaaatcggcaaaatcccttataaatcaaaagaatagaccgagatagggttgagtgttgttccagtttggaacaagagtccactattaaagaacgtggactccaacgtcaaagggcgaaaaaccgtctatcagggcgatggcccactacgtgaaccatcaccctaatcaagttttttggggtcgaggtgccgtaaagcactaaatcggaaccctaaagggagcccccgatttagagcttgacggggaaagccggcgaacgtggcgagaaaggaagggaagaaagcgaaaggagcgggcgctagggcgctggcaagtgtagcggtcacgctgcgcgtaaccaccacacccgccgcgcttaatgcgccgctacagggcgcgtcaggtggcacttttcggggaaatgtgcgcggaacccctatttgtttatttttctaaatacattcaaatatgtatccgctcatgagacaataaccctgataaatgcttcaataatattgaaaaaggaagagtcctgaggcggaaagaaccagctgtggaatgtgtgtcagttagggtgtggaaagtccccaggctccccagcaggcagaagtatgcaaagcatgcatctcaattagtcagcaaccaggtgtggaaagtccccaggctccccagcaggcagaagtatgcaaagcatgcatctcaattagtcagcaaccatagtcccgcccctaactccgcccatcccgcccctaactccgcccagttccgcccattctccgccccatggctgactaattttttttatttatgcagaggccgaggccgcctcggcctctgagctattccagaagtagtgaggaggcttttttggaggcctaggcttttgcaaagatcgatcaagagacaggatgaggatcgtttcgcatgattgaacaagatggattgcacgcaggttctccggccgcttgggtggagaggctattcggctatgactgggcacaacagacaatcggctgctctgatgccgccgtgttccggctgtcagcgcaggggcgcccggttctttttgtcaagaccgacctgtccggtgccctgaatgaactgcaagacgaggcagcgcggctatcgtggctggccacgacgggcgttccttgcgcagctgtgctcgacgttgtcactgaagcgggaagggactggctgctattgggcgaagtgccggggcaggatctcctgtcatctcaccttgctcctgccgagaaagtatccatcatggctgatgcaatgcggcggctgcatacgcttgatccggctacctgcccattcgaccaccaagcgaaacatcgcatcgagcgagcacgtactcggatggaagccggtcttgtcgatcaggatgatctggacgaagagcatcaggggctcgcgccagccgaactgttcgccaggctcaaggcgagcatgcccgacggcgaggatctcgtcgtgacccatggcgatgcctgcttgccgaatatcatggtggaaaatggccgcttttctggattcatcgactgtggccggctgggtgtggcggaccgctatcaggacatagcgttggctacccgtgatattgctgaagagcttggcggcgaatgggctgaccgcttcctcgtgctttacggtatcgccgctcccgattcgcagcgcatcgccttctatcgccttcttgacgagttcttctgagcgggactctggggttcgaaatgaccgaccaagcgacgcccaacctgccatcacgagatttcgattccaccgccgccttctatgaaaggttgggcttcggaatcgttttccgggacgccggctggatgatcctccagcgcggggatctcatgctggagttcttcgcccaccctagggggaggctaactgaaacacggaaggagacaataccggaaggaacccgcgctatgacggcaataaaaagacagaataaaacgcacggtgttgggtcgtttgttcataaacgcggggttcggtcccagggctggcactctgtcgataccccaccgagaccccattggggccaatacgcccgcgtttcttccttttccccaccccaccccccaagttcgggtgaaggcccagggctcgcagccaacgtcggggcggcaggccctgccatagcctcaggttactcatatatactttagattgatttaaaacttcatttttaatttaaaaggatctaggtgaagatcctttttgataatctcatgaccaaaatcccttaacgtgagttttcgttccactgagcgtcagaccccgtagaaaagatcaaaggatcttcttgagatcctttttttctgcgcgtaatctgctgcttgcaaacaaaaaaaccaccgctaccagcggtggtttgtttgccggatcaagagctaccaactctttttccgaaggtaactggcttcagcagagcgcagataccaaatactgttcttctagtgtagccgtagttaggccaccacttcaagaactctgtagcaccgcctacatacctcgctctgctaatcctgttaccagtggctgctgccagtggcgataagtcgtgtcttaccgggttggactcaagacgatagttaccggataaggcgcagcggtcgggctgaacggggggttcgtgcacacagcccagcttggagcgaacgacctacaccgaactgagatacctacagcgtgagctatgagaaagcgccacgcttcccgaagggagaaaggcggacaggtatccggtaagcggcagggtcggaacaggagagcgcacgagggagcttccagggggaaacgcctggtatctttatagtcctgtcgggtttcgccacctctgacttgagcgtcgatttttgtgatgctcgtcaggggggcggagcctatggaaaaacgccagcaacgcggcctttttacggttcctggccttttgctggccttttgctcacatgttctttcctgcgttatcccctgattctgtggataaccgtattaccgccatgcattagttattaatagtaatcaattacggggtcattagttcatagcccatatatggagttccgcgttacataacttacggtaaatggcccgcctggctgaccgcccaacgacccccgcccattgacgtcaataatgacgtatgttcccatagtaacgccaatagggactttccattgacgtcaatgggtggagtatttacggtaaactgcccacttggcagtacatcaa

SEQ ID NO: 49 - DNA, 5528 bp, Artificial Sequence
  Synthetic
gtgtatcatatgccaagtacgccccctattgacgtcaatgacggtaaatggcccgcctggcattatgcccagtacatgaccttatgggactttcctacttggcagtacatctacgtattagtcatcgctattaccatggtgatgcggttttggcagtacatcaatgggcgtggatagcggtttgactcacggggatttccaagtctccaccccattgacgtcaatgggagtttgttttggcaccaaaatcaacgggactttccaaaatgtcgtaacaactccgccccattgacgcaaatgggcggtaggcgtgtacggtgggaggtctatataagcagagctggtttagtgaaccgtcagatccgctagcgctaccggactcagatctcgagctcatgaattggagcatttttgaaggcctgttgagtggggtgaacaaatattccaccgccttcggtcggatctggttgtctcttgtttttatatttcgcgtactggtatacctcgtcacagccgaacgggtctggtccgatgaccacaaagattttgattgcaacacgcgccaacctggatgcagtaacgtctgctttgacgaatttttccctgttagtcatgtaaggctctgggctttgcaactgattcttgtaacctgcccttcactgctcgtagtaatgcacgtcgcatacagggaggtgcaggagaagaggcaccgcgaagctcatggggaaaacagtgggcgactctacttgaacccaggtaagaaaagaggggggctttggtggacttacgtttgctctctcgtattcaaagcatccgtcgacattgcatttctctacgtcttccattccttttacccaaagtacattctgccaccagtagtcaaatgccacgcggatccttgccccaacatagtggattgctttattagcaagccctctgaaaaaaatatctttactcttttcatggtggctacggcggcaatctgcatcctccttaatcttgtggagttgatttacctcgtctctaaacggtgtcacgagtgcctcgcagcccggaaggcccaggcgatgtgtactggccaccaccctcacgggactacttcatcctgcaagcaagacgacctcttgtctggggatttgatattcttggggagcgattctcacccacccttgcttccggacaggcccagggatcatgtgaaaaagacgatattgggaggttcaggcggtgatccaccggtcgccaccatggtgagcaagggcgaggagctgttcaccggggtggtgcccatcctggtcgagctggacggcgacgtaaacggccacaagttcagcgtgtccggcgagggcgagggcgatgccacctacggcaagctgaccctgaagttcatctgcaccaccggcaagctgcccgtgccctggcccaccctcgtgaccaccttgacctacggcgtgcagtgcttcgcccgctaccccgaccacatgaagcagcacgacttcttcaagtccgccatgcccgaaggctacgtccaggagcgcaccatcttcttcaaggacgacggcaactacaagacccgcgccgaggtgaagttcgagggcgacaccctggtgaaccgcatcgagctgaagggcatcgacttcaaggaggacggcaacatcctggggcacaagctggagtacaactacaacagccacaaggtctatatcaccgccgacaagcagaagaacggcatcaaggtgaacttcaagacccgccacaacatcgaggacggcagcgtgcagctcgccgaccactaccagcagaacacccccatcggcgacggccccgtgctgctgcccgacaaccactacctgagcacccagtccaagctgagcaaagaccccaacgagaagcgcgatcacatggtcctgctggagttcgtgaccgccgccgggatcactctcggcatggacgagctgtacaagtaaagcggccgcgactctagatcataatcagccataccacatttgtagaggttttacttgctttaaaaaacctcccacacctccccctgaacctgaaacataaaatgaatgcaattgttgttgttaacttgtttattgcagcttataatggttacaaataaagcaatagcatcacaaatttcacaaataaagcatttttttcactgcattctagttgtggtttgtccaaactcatcaatgtatcttaaggcgtaaattgtaagcgttaatattttgttaaaattcgcgttaaatttttgttaaatcagctcattttttaaccaataggccgaaatcggcaaaatcccttataaatcaaaagaatagaccgagatagggttgagtgttgttccagtttggaacaagagtccactattaaagaacgtggactccaacgtcaaagggcgaaaaaccgtctatcagggcgatggcccactacgtgaaccatcaccctaatcaagttttttggggtcgaggtgccgtaaagcactaaatcggaaccctaaagggagcccccgatttagagcttgacggggaaagccggcgaacgtggcgagaaaggaagggaagaaagcgaaaggagcgggcgctagggcgctggcaagtgtagcggtcacgctgcgcgtaaccaccacacccgccgcgcttaatgcgccgctacagggcgcgtcaggtggcacttttcggggaaatgtgcgcggaacccctatttgtttatttttctaaatacattcaaatatgtatccgctcatgagacaataaccctgataaatgcttcaataatattgaaaaaggaagagtcctgaggcggaaagaaccagctgtggaatgtgtgtcagttagggtgtggaaagtccccaggctccccagcaggcagaagtatgcaaagcatgcatctcaattagtcagcaaccaggtgtggaaagtccccaggctccccagcaggcagaagtatgcaaagcatgcatctcaattagtcagcaaccatagtcccgcccctaactccgcccatcccgcccctaactccgcccagttccgcccattctccgccccatggctgactaattttttttatttatgcagaggccgaggccgcctcggcctctgagctattccagaagtagtgaggaggcttttttggaggcctaggcttttgcaaagatcgatcaagagacaggatgaggatcgtttcgcatgattgaacaagatggattgcacgcaggttctccggccgcttgggtggagaggctattcggctatgactgggcacaacagacaatcggctgctctgatgccgccgtgttccggctgtcagcgcaggggcgcccggttctttttgtcaagaccgacctgtccggtgccctgaatgaactgcaagacgaggcagcgcggctatcgtggctggccacgacgggcgttccttgcgcagctgtgctcgacgttgtcactgaagcgggaagggactggctgctattgggcgaagtgccggggcaggatctcctgtcatctcaccttgctcctgccgagaaagtatccatcatggctgatgcaatgcggcggctgcatacgcttgatccggctacctgcccattcgaccaccaagcgaaacatcgcatcgagcgagcacgtactcggatggaagccggtcttgtcgatcaggatgatctggacgaagagcatcaggggctcgcgccagccgaactgttcgccaggctcaaggcgagcatgcccgacggcgaggatctcgtcgtgacccatggcgatgcctgcttgccgaatatcatggtggaaaatggccgcttttctggattcatcgactgtggccggctgggtgtggcggaccgctatcaggacatagcgttggctacccgtgatattgctgaagagcttggcggcgaatgggctgaccgcttcctcgtgctttacggtatcgccgctcccgattcgcagcgcatcgccttctatcgccttcttgacgagttcttctgagcgggactctggggttcgaaatgaccgaccaagcgacgcccaacctgccatcacgagatttcgattccaccgccgccttctatgaaaggttgggcttcggaatcgttttccgggacgccggctggatgatcctccagcgcggggatctcatgctggagttcttcgcccaccctagggggaggctaactgaaacacggaaggagacaataccggaaggaacccgcgctatgacggcaataaaaagacagaataaaacgcacggtgttgggtcgtttgttcataaacgcggggttcggtcccagggctggcactctgtcgataccccaccgagaccccattggggccaatacgcccgcgtttcttccttttccccaccccaccccccaagttcgggtgaaggcccagggctcgcagccaacgtcggggcggcaggccctgccatagcctcaggttactcatatatactttagattgatttaaaacttcatttttaatttaaaaggatctaggtgaagatcctttttgataatctcatgaccaaaatcccttaacgtgagttttcgttccactgagcgtcagaccccgtagaaaagatcaaaggatcttcttgagatcctttttttctgcgcgtaatctgctgcttgcaaacaaaaaaaccaccgctaccagcggtggtttgtttgccggatcaagagctaccaactctttttccgaaggtaactggcttcagcagagcgcagataccaaatactgttcttctagtgtagccgtagttaggccaccacttcaagaactctgtagcaccgcctacatacctcgctctgctaatcctgttaccagtggctgctgccagtggcgataagtcgtgtcttaccgggttggactcaagacgatagttaccggataaggcgcagcggtcgggctgaacggggggttcgtgcacacagcccagcttggagcgaacgacctacaccgaactgagatacctacagcgtgagctatgagaaagcgccacgcttcccgaagggagaaaggcggacaggtatccggtaagcggcagggtcggaacaggagagcgcacgagggagcttccagggggaaacgcctggtatctttatagtcctgtcgggtttcgccacctctgacttgagcgtcgatttttgtgatgctcgtcaggggggcggagcctatggaaaaacgccagcaacgcggcctttttacggttcctggccttttgctggccttttgctcacatgttctttcctgcgttatcccctgattctgtggataaccgtattaccgccatgcattagttattaatagtaatcaattacggggtcattagttcatagcccatatatggagttccgcgttacataacttacggtaaatggcccgcctggctgaccgcccaacgacccccgcccattgacgtcaataatgacgtatgttcccatagtaacgccaatagggactttccattgacgtcaatgggtggagtatttacggtaaactgcccacttggcagtacatcaa

SEQ ID NO: 50 - DNA, 5546 bp, Artificial Sequence
  Synthetic
gtgtatcatatgccaagtacgccccctattgacgtcaatgacggtaaatggcccgcctggcattatgcccagtacatgaccttatgggactttcctacttggcagtacatctacgtattagtcatcgctattaccatggtgatgcggttttggcagtacatcaatgggcgtggatagcggtttgactcacggggatttccaagtctccaccccattgacgtcaatgggagtttgttttggcaccaaaatcaacgggactttccaaaatgtcgtaacaactccgccccattgacgcaaatgggcggtaggcgtgtacggtgggaggtctatataagcagagctggtttagtgaaccgtcagatccgctagcgctaccggactcagatctcgagctcatgtgcggtagattcttgcggaggctcttggccgaagaatccaggcggtccacaccggtaggcaggctccttcttccagtcttgcttggattccgactggttcttctcgcagcaagcggtcctggcgtttacggggacgagcaatcagagttcgtatgccacacgcaacaaccgggctgtaaggcggcatgctttgacgcattccatccgctttcacctcttcggttctgggtgttccaagtcatccttgtcgctgtcccatcagcgctttatatgggattcacattgtatcacgttatttggcactgggaattgtccggaaagggtaaagaggaagaaactttgatccaaggacgcgagggaaatacagatgtccccggagccggaagtttgaggctcttgtgggcttatgtggcacagcttggcgcgagacttgtacttgaaggggctgcactgggtctccagtatcatctttacggatttcagatgccgagcagtttcgcttgtaggagggaaccatgtctcggctcaatcacttgtaacttgtcaagaccttctgagaagacaatctttctgaaaaccatgtttggagtgagtggcttttgtctgctgttcacgtttctcgagcttgtgctcctgggtctcggacggtggtggcgcacatggaaacataaatccagttcctccaaatattttctcactagtgaatccactcgaaggcataagaaggcaacggacagtcttccggttgtcgagactaaggaacagtttcaagaggcggtacccggtcggagtttggcccaggaaaaacagcgacccgtgggtcccagagacgcaggaggttcaggcggtgatccaccggtcgccaccatggtgagcaagggcgaggagctgttcaccggggtggtgcccatcctggtcgagctggacggcgacgtaaacggccacaagttcagcgtgtccggcgagggcgagggcgatgccacctacggcaagctgaccctgaagttcatctgcaccaccggcaagctgcccgtgccctggcccaccctcgtgaccaccttgacctacggcgtgcagtgcttcgcccgctaccccgaccacatgaagcagcacgacttcttcaagtccgccatgcccgaaggctacgtccaggagcgcaccatcttcttcaaggacgacggcaactacaagacccgcgccgaggtgaagttcgagggcgacaccctggtgaaccgcatcgagctgaagggcatcgacttcaaggaggacggcaacatcctggggcacaagctggagtacaactacaacagccacaaggtctatatcaccgccgacaagcagaagaacggcatcaaggtgaacttcaagacccgccacaacatcgaggacggcagcgtgcagctcgccgaccactaccagcagaacacccccatcggcgacggccccgtgctgctgcccgacaaccactacctgagcacccagtccaagctgagcaaagaccccaacgagaagcgcgatcacatggtcctgctggagttcgtgaccgccgccgggatcactctcggcatggacgagctgtacaagtaaagcggccgcgactctagatcataatcagccataccacatttgtagaggttttacttgctttaaaaaacctcccacacctccccctgaacctgaaacataaaatgaatgcaattgttgttgttaacttgtttattgcagcttataatggttacaaataaagcaatagcatcacaaatttcacaaataaagcatttttttcactgcattctagttgtggtttgtccaaactcatcaatgtatcttaaggcgtaaattgtaagcgttaatattttgttaaaattcgcgttaaatttttgttaaatcagctcattttttaaccaataggccgaaatcggcaaaatcccttataaatcaaaagaatagaccgagatagggttgagtgttgttccagtttggaacaagagtccactattaaagaacgtggactccaacgtcaaagggcgaaaaaccgtctatcagggcgatggcccactacgtgaaccatcaccctaatcaagttttttggggtcgaggtgccgtaaagcactaaatcggaaccctaaagggagcccccgatttagagcttgacggggaaagccggcgaacgtggcgagaaaggaagggaagaaagcgaaaggagcgggcgctagggcgctggcaagtgtagcggtcacgctgcgcgtaaccaccacacccgccgcgcttaatgcgccgctacagggcgcgtcaggtggcacttttcggggaaatgtgcgcggaacccctatttgtttatttttctaaatacattcaaatatgtatccgctcatgagacaataaccctgataaatgcttcaataatattgaaaaaggaagagtcctgaggcggaaagaaccagctgtggaatgtgtgtcagttagggtgtggaaagtccccaggctccccagcaggcagaagtatgcaaagcatgcatctcaattagtcagcaaccaggtgtggaaagtccccaggctccccagcaggcagaagtatgcaaagcatgcatctcaattagtcagcaaccatagtcccgcccctaactccgcccatcccgcccctaactccgcccagttccgcccattctccgccccatggctgactaattttttttatttatgcagaggccgaggccgcctcggcctctgagctattccagaagtagtgaggaggcttttttggaggcctaggcttttgcaaagatcgatcaagagacaggatgaggatcgtttcgcatgattgaacaagatggattgcacgcaggttctccggccgcttgggtggagaggctattcggctatgactgggcacaacagacaatcggctgctctgatgccgccgtgttccggctgtcagcgcaggggcgcccggttctttttgtcaagaccgacctgtccggtgccctgaatgaactgcaagacgaggcagcgcggctatcgtggctggccacgacgggcgttccttgcgcagctgtgctcgacgttgtcactgaagcgggaagggactggctgctattgggcgaagtgccggggcaggatctcctgtcatctcaccttgctcctgccgagaaagtatccatcatggctgatgcaatgcggcggctgcatacgcttgatccggctacctgcccattcgaccaccaagcgaaacatcgcatcgagcgagcacgtactcggatggaagccggtcttgtcgatcaggatgatctggacgaagagcatcaggggctcgcgccagccgaactgttcgccaggctcaaggcgagcatgcccgacggcgaggatctcgtcgtgacccatggcgatgcctgcttgccgaatatcatggtggaaaatggccgcttttctggattcatcgactgtggccggctgggtgtggcggaccgctatcaggacatagcgttggctacccgtgatattgctgaagagcttggcggcgaatgggctgaccgcttcctcgtgctttacggtatcgccgctcccgattcgcagcgcatcgccttctatcgccttcttgacgagttcttctgagcgggactctggggttcgaaatgaccgaccaagcgacgcccaacctgccatcacgagatttcgattccaccgccgccttctatgaaaggttgggcttcggaatcgttttccgggacgccggctggatgatcctccagcgcggggatctcatgctggagttcttcgcccaccctagggggaggctaactgaaacacggaaggagacaataccggaaggaacccgcgctatgacggcaataaaaagacagaataaaacgcacggtgttgggtcgtttgttcataaacgcggggttcggtcccagggctggcactctgtcgataccccaccgagaccccattggggccaatacgcccgcgtttcttccttttccccaccccaccccccaagttcgggtgaaggcccagggctcgcagccaacgtcggggcggcaggccctgccatagcctcaggttactcatatatactttagattgatttaaaacttcatttttaatttaaaaggatctaggtgaagatcctttttgataatctcatgaccaaaatcccttaacgtgagttttcgttccactgagcgtcagaccccgtagaaaagatcaaaggatcttcttgagatcctttttttctgcgcgtaatctgctgcttgcaaacaaaaaaaccaccgctaccagcggtggtttgtttgccggatcaagagctaccaactctttttccgaaggtaactggcttcagcagagcgcagataccaaatactgttcttctagtgtagccgtagttaggccaccacttcaagaactctgtagcaccgcctacatacctcgctctgctaatcctgttaccagtggctgctgccagtggcgataagtcgtgtcttaccgggttggactcaagacgatagttaccggataaggcgcagcggtcgggctgaacggggggttcgtgcacacagcccagcttggagcgaacgacctacaccgaactgagatacctacagcgtgagctatgagaaagcgccacgcttcccgaagggagaaaggcggacaggtatccggtaagcggcagggtcggaacaggagagcgcacgagggagcttccagggggaaacgcctggtatctttatagtcctgtcgggtttcgccacctctgacttgagcgtcgatttttgtgatgctcgtcaggggggcggagcctatggaaaaacgccagcaacgcggcctttttacggttcctggccttttgctggccttttgctcacatgttctttcctgcgttatcccctgattctgtggataaccgtattaccgccatgcattagttattaatagtaatcaattacggggtcattagttcatagcccatatatggagttccgcgttacataacttacggtaaatggcccgcctggctgaccgcccaacgacccccgcccattgacgtcaataatgacgtatgttcccatagtaacgccaatagggactttccattgacgtcaatgggtggagtatttacggtaaactgcccacttggcagtacatcaa

SEQ ID NO: 51 - DNA, 5591 bp, Artificial Sequence
  Synthetic
gtgtatcatatgccaagtacgccccctattgacgtcaatgacggtaaatggcccgcctggcattatgcccagtacatgaccttatgggactttcctacttggcagtacatctacgtattagtcatcgctattaccatggtgatgcggttttggcagtacatcaatgggcgtggatagcggtttgactcacggggatttccaagtctccaccccattgacgtcaatgggagtttgttttggcaccaaaatcaacgggactttccaaaatgtcgtaacaactccgccccattgacgcaaatgggcggtaggcgtgtacggtgggaggtctatataagcagagctggtttagtgaaccgtcagatccgctagcgctaccggactcagatctcgagctcatgggcgaatgggctttcctcggcagccttcttgatgcggttcagcttcagtctccccttgttggacggctgtggttggtagtcatgcttatcttcagaatcttggtacttgccacggtgggaggagctgtcttcgaggatgaacaagaggaatttgtatgcaatacgctccaacccgggtgtcgacaaacatgttatgatcgcgccttcccggtgtctcactatagattctggctttttcacatccttctgctgtctgctccgcctgttctcttcgtagtctactctatgcaccgagcaggaaaagaagccggaggagccgaagcagcagcgcagtgtgcacctggacttcctgaggctcagtgtgccccttgtgcgctcagggcacgaagggccaggcggtgctacttgttgagtgttgccttgcggcttcttgccgagctgacgttcttgggaggtcaagctttgttgtacggctttagagtagccccacactttgcctgcgcaggcccaccttgtccacacactgtcgactgttttgtttcccggcctacagaaaagactgtgttcgttttgttttactttgccgtcggtttgcttagtgcactcttgtcagtcgcagagctcggtcacctcctctggaaagggcggccgagggctggggagagggacaaccgatgtaaccgagcgcacgaggaagcgcagaaacttttgccgccccctccccctcctccgcctccccctgctcttccatcacgcaggcctgggcctgaaccttgtgcacctcctgcatatgcccacccagccccggcgtcactgagagaatgtggcagcggaagaggtaaggccagccccgctactgggcggcgggatcttgctatcggaggttcaggcggtgatccaccggtcgccaccatggtgagcaagggcgaggagctgttcaccggggtggtgcccatcctggtcgagctggacggcgacgtaaacggccacaagttcagcgtgtccggcgagggcgagggcgatgccacctacggcaagctgaccctgaagttcatctgcaccaccggcaagctgcccgtgccctggcccaccctcgtgaccaccttgacctacggcgtgcagtgcttcgcccgctaccccgaccacatgaagcagcacgacttcttcaagtccgccatgcccgaaggctacgtccaggagcgcaccatcttcttcaaggacgacggcaactacaagacccgcgccgaggtgaagttcgagggcgacaccctggtgaaccgcatcgagctgaagggcatcgacttcaaggaggacggcaacatcctggggcacaagctggagtacaactacaacagccacaaggtctatatcaccgccgacaagcagaagaacggcatcaaggtgaacttcaagacccgccacaacatcgaggacggcagcgtgcagctcgccgaccactaccagcagaacacccccatcggcgacggccccgtgctgctgcccgacaaccactacctgagcacccagtccaagctgagcaaagaccccaacgagaagcgcgatcacatggtcctgctggagttcgtgaccgccgccgggatcactctcggcatggacgagctgtacaagtaaagcggccgcgactctagatcataatcagccataccacatttgtagaggttttacttgctttaaaaaacctcccacacctccccctgaacctgaaacataaaatgaatgcaattgttgttgttaacttgtttattgcagcttataatggttacaaataaagcaatagcatcacaaatttcacaaataaagcatttttttcactgcattctagttgtggtttgtccaaactcatcaatgtatcttaaggcgtaaattgtaagcgttaatattttgttaaaattcgcgttaaatttttgttaaatcagctcattttttaaccaataggccgaaatcggcaaaatcccttataaatcaaaagaatagaccgagatagggttgagtgttgttccagtttggaacaagagtccactattaaagaacgtggactccaacgtcaaagggcgaaaaaccgtctatcagggcgatggcccactacgtgaaccatcaccctaatcaagttttttggggtcgaggtgccgtaaagcactaaatcggaaccctaaagggagcccccgatttagagcttgacggggaaagccggcgaacgtggcgagaaaggaagggaagaaagcgaaaggagcgggcgctagggcgctggcaagtgtagcggtcacgctgcgcgtaaccaccacacccgccgcgcttaatgcgccgctacagggcgcgtcaggtggcacttttcggggaaatgtgcgcggaacccctatttgtttatttttctaaatacattcaaatatgtatccgctcatgagacaataaccctgataaatgcttcaataatattgaaaaaggaagagtcctgaggcggaaagaaccagctgtggaatgtgtgtcagttagggtgtggaaagtccccaggctccccagcaggcagaagtatgcaaagcatgcatctcaattagtcagcaaccaggtgtggaaagtccccaggctccccagcaggcagaagtatgcaaagcatgcatctcaattagtcagcaaccatagtcccgcccctaactccgcccatcccgcccctaactccgcccagttccgcccattctccgccccatggctgactaattttttttatttatgcagaggccgaggccgcctcggcctctgagctattccagaagtagtgaggaggcttttttggaggcctaggcttttgcaaagatcgatcaagagacaggatgaggatcgtttcgcatgattgaacaagatggattgcacgcaggttctccggccgcttgggtggagaggctattcggctatgactgggcacaacagacaatcggctgctctgatgccgccgtgttccggctgtcagcgcaggggcgcccggttctttttgtcaagaccgacctgtccggtgccctgaatgaactgcaagacgaggcagcgcggctatcgtggctggccacgacgggcgttccttgcgcagctgtgctcgacgttgtcactgaagcgggaagggactggctgctattgggcgaagtgccggggcaggatctcctgtcatctcaccttgctcctgccgagaaagtatccatcatggctgatgcaatgcggcggctgcatacgcttgatccggctacctgcccattcgaccaccaagcgaaacatcgcatcgagcgagcacgtactcggatggaagccggtcttgtcgatcaggatgatctggacgaagagcatcaggggctcgcgccagccgaactgttcgccaggctcaaggcgagcatgcccgacggcgaggatctcgtcgtgacccatggcgatgcctgcttgccgaatatcatggtggaaaatggccgcttttctggattcatcgactgtggccggctgggtgtggcggaccgctatcaggacatagcgttggctacccgtgatattgctgaagagcttggcggcgaatgggctgaccgcttcctcgtgctttacggtatcgccgctcccgattcgcagcgcatcgccttctatcgccttcttgacgagttcttctgagcgggactctggggttcgaaatgaccgaccaagcgacgcccaacctgccatcacgagatttcgattccaccgccgccttctatgaaaggttgggcttcggaatcgttttccgggacgccggctggatgatcctccagcgcggggatctcatgctggagttcttcgcccaccctagggggaggctaactgaaacacggaaggagacaataccggaaggaacccgcgctatgacggcaataaaaagacagaataaaacgcacggtgttgggtcgtttgttcataaacgcggggttcggtcccagggctggcactctgtcgataccccaccgagaccccattggggccaatacgcccgcgtttcttccttttccccaccccaccccccaagttcgggtgaaggcccagggctcgcagccaacgtcggggcggcaggccctgccatagcctcaggttactcatatatactttagattgatttaaaacttcatttttaatttaaaaggatctaggtgaagatcctttttgataatctcatgaccaaaatcccttaacgtgagttttcgttccactgagcgtcagaccccgtagaaaagatcaaaggatcttcttgagatcctttttttctgcgcgtaatctgctgcttgcaaacaaaaaaaccaccgctaccagcggtggtttgtttgccggatcaagagctaccaactctttttccgaaggtaactggcttcagcagagcgcagataccaaatactgttcttctagtgtagccgtagttaggccaccacttcaagaactctgtagcaccgcctacatacctcgctctgctaatcctgttaccagtggctgctgccagtggcgataagtcgtgtcttaccgggttggactcaagacgatagttaccggataaggcgcagcggtcgggctgaacggggggttcgtgcacacagcccagcttggagcgaacgacctacaccgaactgagatacctacagcgtgagctatgagaaagcgccacgcttcccgaagggagaaaggcggacaggtatccggtaagcggcagggtcggaacaggagagcgcacgagggagcttccagggggaaacgcctggtatctttatagtcctgtcgggtttcgccacctctgacttgagcgtcgatttttgtgatgctcgtcaggggggcggagcctatggaaaaacgccagcaacgcggcctttttacggttcctggccttttgctggccttttgctcacatgttctttcctgcgttatcccctgattctgtggataaccgtattaccgccatgcattagttattaatagtaatcaattacggggtcattagttcatagcccatatatggagttccgcgttacataacttacggtaaatggcccgcctggctgaccgcccaacgacccccgcccattgacgtcaataatgacgtatgttcccatagtaacgccaatagggactttccattgacgtcaatgggtggagtatttacggtaaactgcccacttggcagtacatcaa

SEQ ID NO: 52 - DNA, 5534 bp, Artificial Sequence
  Synthetic
atatatggagttccgcgttacataacttacggtaaatggcccgcctggctgaccgcccaacgacccccgcccattgacgtcaataatgacgtatgttcccatagtaacgccaatagggactttccattgacgtcaatgggtggagtatttacggtaaactgcccacttggcagtacatcaagtgtatcatatgccaagtacgccccctattgacgtcaatgacggtaaatggcccgcctggcattatgcccagtacatgaccttatgggactttcctacttggcagtacatctacgtattagtcatcgctattaccatggtgatgcggttttggcagtacatcaatgggcgtggatagcggtttgactcacggggatttccaagtctccaccccattgacgtcaatgggagtttgttttggcaccaaaatcaacgggactttccaaaatgtcgtaacaactccgccccattgacgcaaatgggcggtaggcgtgtacggtgggaggtctatataagcagagctggtttagtgaaccgtcagatccgctagcgctaccggactcagatcatgaactggacaggactttacactctgttgtcaggagtaaataggcactcaactgcgatagggcgggtctggcttagtgtgattttcatatttcggattatggttcttgttgttgcggcagaaagcgtatggggggacgaaaaatcatctttcatctgcaataccttgcaacctggatgcaattcagtctgctacgaccaattcttccctatatcccatgtcaggctctggtctctgcaactcatccttgtttcaacacccgcgttgcttgtggctatgcatgtagcccatcaacaacacattgagaaaaagatgcttcggcttgaagggcacggcgacccgcttcatcttgaagaagttaaaagacacaaggtccatatcagcgggaccctttggtggacttatgtgatctcagtagttttcaggctgctgtttgaagccgtgtttatgtacgttttttacttgctctatccggggtacgcgatggtcaggcttgtaaagtgtgatgtatacccttgtcccaacactgtagactgctttgttagtcggcccaccgagaagacggtgtttaccgtctttatgcttgcagcgagtggaatctgtattatcttgaacgtagcggaagttgtatatctcataatccgggcgtgtgccaggcgcgctcagcggcggtcaaatcctccgagccgcaaaggcagcggcttcggccatcgcctgtcccctgaatacaagcaaaatgaaataaacaagcttttgtctgaacaagacggtagtctgaaggacatattgcgaaggtctcctgggaccggagccggcctggccgagaaatccgaccggtgttccgcatgtgatccaccggtcgccaccatggtgagcaagggcgaggagctgttcaccggggtggtgcccatcctggtcgagctggacggcgacgtaaacggccacaagttcagcgtgtccggcgagggcgagggcgatgccacctacggcaagctgaccctgaagttcatctgcaccaccggcaagctgcccgtgccctggcccaccctcgtgaccaccttgacctacggcgtgcagtgcttcgcccgctaccccgaccacatgaagcagcacgacttcttcaagtccgccatgcccgaaggctacgtccaggagcgcaccatcttcttcaaggacgacggcaactacaagacccgcgccgaggtgaagttcgagggcgacaccctggtgaaccgcatcgagctgaagggcatcgacttcaaggaggacggcaacatcctggggcacaagctggagtacaactacaacagccacaaggtctatatcaccgccgacaagcagaagaacggcatcaaggtgaacttcaagacccgccacaacatcgaggacggcagcgtgcagctcgccgaccactaccagcagaacacccccatcggcgacggccccgtgctgctgcccgacaaccactacctgagcacccagtccaagctgagcaaagaccccaacgagaagcgcgatcacatggtcctgctggagttcgtgaccgccgccgggatcactctcggcatggacgagctgtacaagtaagcggccgcgactctagatcataatcagccataccacatttgtagaggttttacttgctttaaaaaacctcccacacctccccctgaacctgaaacataaaatgaatgcaattgttgttgttaacttgtttattgcagcttataatggttacaaataaagcaatagcatcacaaatttcacaaataaagcatttttttcactgcattctagttgtggtttgtccaaactcatcaatgtatcttaaggcgtaaattgtaagcgttaatattttgttaaaattcgcgttaaatttttgttaaatcagctcattttttaaccaataggccgaaatcggcaaaatcccttataaatcaaaagaatagaccgagatagggttgagtgttgttccagtttggaacaagagtccactattaaagaacgtggactccaacgtcaaagggcgaaaaaccgtctatcagggcgatggcccactacgtgaaccatcaccctaatcaagttttttggggtcgaggtgccgtaaagcactaaatcggaaccctaaagggagcccccgatttagagcttgacggggaaagccggcgaacgtggcgagaaaggaagggaagaaagcgaaaggagcgggcgctagggcgctggcaagtgtagcggtcacgctgcgcgtaaccaccacacccgccgcgcttaatgcgccgctacagggcgcgtcaggtggcacttttcggggaaatgtgcgcggaacccctatttgtttatttttctaaatacattcaaatatgtatccgctcatgagacaataaccctgataaatgcttcaataatattgaaaaaggaagagtcctgaggcggaaagaaccagctgtggaatgtgtgtcagttagggtgtggaaagtccccaggctccccagcaggcagaagtatgcaaagcatgcatctcaattagtcagcaaccaggtgtggaaagtccccaggctccccagcaggcagaagtatgcaaagcatgcatctcaattagtcagcaaccatagtcccgcccctaactccgcccatcccgcccctaactccgcccagttccgcccattctccgccccatggctgactaattttttttatttatgcagaggccgaggccgcctcggcctctgagctattccagaagtagtgaggaggcttttttggaggcctaggcttttgcaaagatcgatcaagagacaggatgaggatcgtttcgcatgattgaacaagatggattgcacgcaggttctccggccgcttgggtggagaggctattcggctatgactgggcacaacagacaatcggctgctctgatgccgccgtgttccggctgtcagcgcaggggcgcccggttctttttgtcaagaccgacctgtccggtgccctgaatgaactgcaagacgaggcagcgcggctatcgtggctggccacgacgggcgttccttgcgcagctgtgctcgacgttgtcactgaagcgggaagggactggctgctattgggcgaagtgccggggcaggatctcctgtcatctcaccttgctcctgccgagaaagtatccatcatggctgatgcaatgcggcggctgcatacgcttgatccggctacctgcccattcgaccaccaagcgaaacatcgcatcgagcgagcacgtactcggatggaagccggtcttgtcgatcaggatgatctggacgaagagcatcaggggctcgcgccagccgaactgttcgccaggctcaaggcgagcatgcccgacggcgaggatctcgtcgtgacccatggcgatgcctgcttgccgaatatcatggtggaaaatggccgcttttctggattcatcgactgtggccggctgggtgtggcggaccgctatcaggacatagcgttggctacccgtgatattgctgaagagcttggcggcgaatgggctgaccgcttcctcgtgctttacggtatcgccgctcccgattcgcagcgcatcgccttctatcgccttcttgacgagttcttctgagcgggactctggggttcgaaatgaccgaccaagcgacgcccaacctgccatcacgagatttcgattccaccgccgccttctatgaaaggttgggcttcggaatcgttttccgggacgccggctggatgatcctccagcgcggggatctcatgctggagttcttcgcccaccctagggggaggctaactgaaacacggaaggagacaataccggaaggaacccgcgctatgacggcaataaaaagacagaataaaacgcacggtgttgggtcgtttgttcataaacgcggggttcggtcccagggctggcactctgtcgataccccaccgagaccccattggggccaatacgcccgcgtttcttccttttccccaccccaccccccaagttcgggtgaaggcccagggctcgcagccaacgtcggggcggcaggccctgccatagcctcaggttactcatatatactttagattgatttaaaacttcatttttaatttaaaaggatctaggtgaagatcctttttgataatctcatgaccaaaatcccttaacgtgagttttcgttccactgagcgtcagaccccgtagaaaagatcaaaggatcttcttgagatcctttttttctgcgcgtaatctgctgcttgcaaacaaaaaaaccaccgctaccagcggtggtttgtttgccggatcaagagctaccaactctttttccgaaggtaactggcttcagcagagcgcagataccaaatactgttcttctagtgtagccgtagttaggccaccacttcaagaactctgtagcaccgcctacatacctcgctctgctaatcctgttaccagtggctgctgccagtggcgataagtcgtgtcttaccgggttggactcaagacgatagttaccggataaggcgcagcggtcgggctgaacggggggttcgtgcacacagcccagcttggagcgaacgacctacaccgaactgagatacctacagcgtgagctatgagaaagcgccacgcttcccgaagggagaaaggcggacaggtatccggtaagcggcagggtcggaacaggagagcgcacgagggagcttccagggggaaacgcctggtatctttatagtcctgtcgggtttcgccacctctgacttgagcgtcgatttttgtgatgctcgtcaggggggcggagcctatggaaaaacgccagcaacgcggcctttttacggttcctggccttttgctggccttttgctcacatgttctttcctgcgttatcccctgattctgtggataaccgtattaccgccatgcattagttattaatagtaatcaattacggggtcattagttcatagccc

SEQ ID NO: 53 - DNA, 5655 bp, Artificial Sequence
  Synthetic
atatatggagttccgcgttacataacttacggtaaatggcccgcctggctgaccgcccaacgacccccgcccattgacgtcaataatgacgtatgttcccatagtaacgccaatagggactttccattgacgtcaatgggtggagtatttacggtaaactgcccacttggcagtacatcaagtgtatcatatgccaagtacgccccctattgacgtcaatgacggtaaatggcccgcctggcattatgcccagtacatgaccttatgggactttcctacttggcagtacatctacgtattagtcatcgctattaccatggtgatgcggttttggcagtacatcaatgggcgtggatagcggtttgactcacggggatttccaagtctccaccccattgacgtcaatgggagtttgttttggcaccaaaatcaacgggactttccaaaatgtcgtaacaactccgccccattgacgcaaatgggcggtaggcgtgtacggtgggaggtctatataagcagagctggtttagtgaaccgtcagatccgctagcgctaccggactcagatctcgagctatgggagaatggacgatactcgagaggttgttggaggcagcagtgcaacagcactctacaatgatcggtcgcatactgctcacggttgtggtgatatttaggatcttgatcgtcgccatcgtcggtgagacagtatatgacgatgaacaaaccatgttcgtgtgtaatacacttcaaccagggtgcaatcaggcatgttacgaccgcgcatttcccatctcccacatacgctattgggtatttcagatcataatggtatgtactccttccctgtgctttatcacttattccgtgcatcaatccgcgaagcagcgagaaagacgctacagtaccgtatttcttgcgctggaccgagacccacccgaaagcattggggggcctggtgggaccgggggagggggttctggcggtggtaaacgagaagataaaaagctgcagaacgcgattgttaacggagtactgcaaaatacggaaaatacatctaaggagacggagccagactgcctcgaagtgaaagaactcacgcctcacccatccggactccgcacagcctcaaagtcaaaactgcgaagacaggaggggatttcacgcttttatattatccaggttgttttccgaaacgctctcgagattggctttctcgtgggtcaatacttcctgtatgggttttctgttcccggactctatgagtgtaaccgctatccctgcatcaaagaagtagaatgctacgtatccagacctacggaaaaaaccgtttttcttgtctttatgttcgccgtgtcaggcatttgcgttgtgctcaatctggccgaactgaaccacctggggtggcgaaagattaaactcgcggtccgaggcgcacaagctaaacggaagtctatttacgaaatacgcaacaaggatctcccgcgggtaagcgtgcctaattttggccggacgcaatcctccgactccgcttatgttgatccaccggtcgccaccatggtgagcaagggcgaggagctgttcaccggggtggtgcccatcctggtcgagctggacggcgacgtaaacggccacaagttcagcgtgtccggcgagggcgagggcgatgccacctacggcaagctgaccctgaagttcatctgcaccaccggcaagctgcccgtgccctggcccaccctcgtgaccaccttgacctacggcgtgcagtgcttcgcccgctaccccgaccacatgaagcagcacgacttcttcaagtccgccatgcccgaaggctacgtccaggagcgcaccatcttcttcaaggacgacggcaactacaagacccgcgccgaggtgaagttcgagggcgacaccctggtgaaccgcatcgagctgaagggcatcgacttcaaggaggacggcaacatcctggggcacaagctggagtacaactacaacagccacaaggtctatatcaccgccgacaagcagaagaacggcatcaaggtgaacttcaagacccgccacaacatcgaggacggcagcgtgcagctcgccgaccactaccagcagaacacccccatcggcgacggccccgtgctgctgcccgacaaccactacctgagcacccagtccaagctgagcaaagaccccaacgagaagcgcgatcacatggtcctgctggagttcgtgaccgccgccgggatcactctcggcatggacgagctgtacaagtaagcggccgcgactctagatcataatcagccataccacatttgtagaggttttacttgctttaaaaaacctcccacacctccccctgaacctgaaacataaaatgaatgcaattgttgttgttaacttgtttattgcagcttataatggttacaaataaagcaatagcatcacaaatttcacaaataaagcatttttttcactgcattctagttgtggtttgtccaaactcatcaatgtatcttaaggcgtaaattgtaagcgttaatattttgttaaaattcgcgttaaatttttgttaaatcagctcattttttaaccaataggccgaaatcggcaaaatcccttataaatcaaaagaatagaccgagatagggttgagtgttgttccagtttggaacaagagtccactattaaagaacgtggactccaacgtcaaagggcgaaaaaccgtctatcagggcgatggcccactacgtgaaccatcaccctaatcaagttttttggggtcgaggtgccgtaaagcactaaatcggaaccctaaagggagcccccgatttagagcttgacggggaaagccggcgaacgtggcgagaaaggaagggaagaaagcgaaaggagcgggcgctagggcgctggcaagtgtagcggtcacgctgcgcgtaaccaccacacccgccgcgcttaatgcgccgctacagggcgcgtcaggtggcacttttcggggaaatgtgcgcggaacccctatttgtttatttttctaaatacattcaaatatgtatccgctcatgagacaataaccctgataaatgcttcaataatattgaaaaaggaagagtcctgaggcggaaagaaccagctgtggaatgtgtgtcagttagggtgtggaaagtccccaggctccccagcaggcagaagtatgcaaagcatgcatctcaattagtcagcaaccaggtgtggaaagtccccaggctccccagcaggcagaagtatgcaaagcatgcatctcaattagtcagcaaccatagtcccgcccctaactccgcccatcccgcccctaactccgcccagttccgcccattctccgccccatggctgactaattttttttatttatgcagaggccgaggccgcctcggcctctgagctattccagaagtagtgaggaggcttttttggaggcctaggcttttgcaaagatcgatcaagagacaggatgaggatcgtttcgcatgattgaacaagatggattgcacgcaggttctccggccgcttgggtggagaggctattcggctatgactgggcacaacagacaatcggctgctctgatgccgccgtgttccggctgtcagcgcaggggcgcccggttctttttgtcaagaccgacctgtccggtgccctgaatgaactgcaagacgaggcagcgcggctatcgtggctggccacgacgggcgttccttgcgcagctgtgctcgacgttgtcactgaagcgggaagggactggctgctattgggcgaagtgccggggcaggatctcctgtcatctcaccttgctcctgccgagaaagtatccatcatggctgatgcaatgcggcggctgcatacgcttgatccggctacctgcccattcgaccaccaagcgaaacatcgcatcgagcgagcacgtactcggatggaagccggtcttgtcgatcaggatgatctggacgaagagcatcaggggctcgcgccagccgaactgttcgccaggctcaaggcgagcatgcccgacggcgaggatctcgtcgtgacccatggcgatgcctgcttgccgaatatcatggtggaaaatggccgcttttctggattcatcgactgtggccggctgggtgtggcggaccgctatcaggacatagcgttggctacccgtgatattgctgaagagcttggcggcgaatgggctgaccgcttcctcgtgctttacggtatcgccgctcccgattcgcagcgcatcgccttctatcgccttcttgacgagttcttctgagcgggactctggggttcgaaatgaccgaccaagcgacgcccaacctgccatcacgagatttcgattccaccgccgccttctatgaaaggttgggcttcggaatcgttttccgggacgccggctggatgatcctccagcgcggggatctcatgctggagttcttcgcccaccctagggggaggctaactgaaacacggaaggagacaataccggaaggaacccgcgctatgacggcaataaaaagacagaataaaacgcacggtgttgggtcgtttgttcataaacgcggggttcggtcccagggctggcactctgtcgataccccaccgagaccccattggggccaatacgcccgcgtttcttccttttccccaccccaccccccaagttcgggtgaaggcccagggctcgcagccaacgtcggggcggcaggccctgccatagcctcaggttactcatatatactttagattgatttaaaacttcatttttaatttaaaaggatctaggtgaagatcctttttgataatctcatgaccaaaatcccttaacgtgagttttcgttccactgagcgtcagaccccgtagaaaagatcaaaggatcttcttgagatcctttttttctgcgcgtaatctgctgcttgcaaacaaaaaaaccaccgctaccagcggtggtttgtttgccggatcaagagctaccaactctttttccgaaggtaactggcttcagcagagcgcagataccaaatactgttcttctagtgtagccgtagttaggccaccacttcaagaactctgtagcaccgcctacatacctcgctctgctaatcctgttaccagtggctgctgccagtggcgataagtcgtgtcttaccgggttggactcaagacgatagttaccggataaggcgcagcggtcgggctgaacggggggttcgtgcacacagcccagcttggagcgaacgacctacaccgaactgagatacctacagcgtgagctatgagaaagcgccacgcttcccgaagggagaaaggcggacaggtatccggtaagcggcagggtcggaacaggagagcgcacgagggagcttccagggggaaacgcctggtatctttatagtcctgtcgggtttcgccacctctgacttgagcgtcgatttttgtgatgctcgtcaggggggcggagcctatggaaaaacgccagcaacgcggcctttttacggttcctggccttttgctggccttttgctcacatgttctttcctgcgttatcccctgattctgtggataaccgtattaccgccatgcattagttattaatagtaatcaattacggggtcattagttcatagccc

SEQ ID NO: 54 - DNA, 5692 bp, Artificial Sequence
  Synthetic
gtgtatcatatgccaagtacgccccctattgacgtcaatgacggtaaatggcccgcctggcattatgcccagtacatgaccttatgggactttcctacttggcagtacatctacgtattagtcatcgctattaccatggtgatgcggttttggcagtacatcaatgggcgtggatagcggtttgactcacggggatttccaagtctccaccccattgacgtcaatgggagtttgttttggcaccaaaatcaacgggactttccaaaatgtcgtaacaactccgccccattgacgcaaatgggcggtaggcgtgtacggtgggaggtctatataagcagagctggtttagtgaaccgtcagatccgctagcgctaccggactcagatctcgagctcatgggggactggggcttcctggagaaactcctggaccaggtacaagaacacagtacagtggtgggtaagatctggctgactgtactttttatttttaggatcttgatacttggacttgcgggagaatccgtttggggggacgaacaaagtgacttcgagtgtaatacagcccagcccggctgtaccaatgtttgttatgatcaggcttttccaataagccatataaggtactgggtccttcaatttctctttgttagcaccccaaccctggtttatctggggcacgtgatctatctttcccgaagagaggaaaggctcaggcaaaaagaaggtgagttgagggcacttccggcaaaagatccacaggtggagcgggcgttggctgctgttgaacgccaaatggcgaagatatcagttgctgaagacggtcgcctcagaatccgaggcgctctcatggggacctatgttgcgagcgtgctctgtaaatctgtgttggaggcagggttcctgtacggccaatggagactgtacgggtggacaatggaacctgtgttcgtctgccaaagggctccttgtccatacttggtagattgttttgtctctcggccaacggagaagacgatcttcattatcttcatgttggtagtagggctcatatcccttgtactcaatttgctcgaattggtgcacctgttgtgtcggtgtctgtcccgggggatgagggcccgccaaggccaggacgcgccaccaacacagggtacttcctcagacccatacacggatcaggtatttttctatcttccggtagggcaaggtccatcaagcccgccctgtccgacttacaatggcctcagttcatcagaacagaactgggcgaaccttactacggaggaaaggctggcctctagccgaccccctttgttcttggaccctccgccacagaatggtcagaagccgccaagcagaccgtctagtagtgcaagtaaaaagcaatacgtggatccaccggtcgccaccatggtgagcaagggcgaggagctgttcaccggggtggtgcccatcctggtcgagctggacggcgacgtaaacggccacaagttcagcgtgtccggcgagggcgagggcgatgccacctacggcaagctgaccctgaagttcatctgcaccaccggcaagctgcccgtgccctggcccaccctcgtgaccaccttgacctacggcgtgcagtgcttcgcccgctaccccgaccacatgaagcagcacgacttcttcaagtccgccatgcccgaaggctacgtccaggagcgcaccatcttcttcaaggacgacggcaactacaagacccgcgccgaggtgaagttcgagggcgacaccctggtgaaccgcatcgagctgaagggcatcgacttcaaggaggacggcaacatcctggggcacaagctggagtacaactacaacagccacaaggtctatatcaccgccgacaagcagaagaacggcatcaaggtgaacttcaagacccgccacaacatcgaggacggcagcgtgcagctcgccgaccactaccagcagaacacccccatcggcgacggccccgtgctgctgcccgacaaccactacctgagcacccagtccaagctgagcaaagaccccaacgagaagcgcgatcacatggtcctgctggagttcgtgaccgccgccgggatcactctcggcatggacgagctgtacaagtaagcggccgcgactctagatcataatcagccataccacatttgtagaggttttacttgctttaaaaaacctcccacacctccccctgaacctgaaacataaaatgaatgcaattgttgttgttaacttgtttattgcagcttataatggttacaaataaagcaatagcatcacaaatttcacaaataaagcatttttttcactgcattctagttgtggtttgtccaaactcatcaatgtatcttaaggcgtaaattgtaagcgttaatattttgttaaaattcgcgttaaatttttgttaaatcagctcattttttaaccaataggccgaaatcggcaaaatcccttataaatcaaaagaatagaccgagatagggttgagtgttgttccagtttggaacaagagtccactattaaagaacgtggactccaacgtcaaagggcgaaaaaccgtctatcagggcgatggcccactacgtgaaccatcaccctaatcaagttttttggggtcgaggtgccgtaaagcactaaatcggaaccctaaagggagcccccgatttagagcttgacggggaaagccggcgaacgtggcgagaaaggaagggaagaaagcgaaaggagcgggcgctagggcgctggcaagtgtagcggtcacgctgcgcgtaaccaccacacccgccgcgcttaatgcgccgctacagggcgcgtcaggtggcacttttcggggaaatgtgcgcggaacccctatttgtttatttttctaaatacattcaaatatgtatccgctcatgagacaataaccctgataaatgcttcaataatattgaaaaaggaagagtcctgaggcggaaagaaccagctgtggaatgtgtgtcagttagggtgtggaaagtccccaggctccccagcaggcagaagtatgcaaagcatgcatctcaattagtcagcaaccaggtgtggaaagtccccaggctccccagcaggcagaagtatgcaaagcatgcatctcaattagtcagcaaccatagtcccgcccctaactccgcccatcccgcccctaactccgcccagttccgcccattctccgccccatggctgactaattttttttatttatgcagaggccgaggccgcctcggcctctgagctattccagaagtagtgaggaggcttttttggaggcctaggcttttgcaaagatcgatcaagagacaggatgaggatcgtttcgcatgattgaacaagatggattgcacgcaggttctccggccgcttgggtggagaggctattcggctatgactgggcacaacagacaatcggctgctctgatgccgccgtgttccggctgtcagcgcaggggcgcccggttctttttgtcaagaccgacctgtccggtgccctgaatgaactgcaagacgaggcagcgcggctatcgtggctggccacgacgggcgttccttgcgcagctgtgctcgacgttgtcactgaagcgggaagggactggctgctattgggcgaagtgccggggcaggatctcctgtcatctcaccttgctcctgccgagaaagtatccatcatggctgatgcaatgcggcggctgcatacgcttgatccggctacctgcccattcgaccaccaagcgaaacatcgcatcgagcgagcacgtactcggatggaagccggtcttgtcgatcaggatgatctggacgaagagcatcaggggctcgcgccagccgaactgttcgccaggctcaaggcgagcatgcccgacggcgaggatctcgtcgtgacccatggcgatgcctgcttgccgaatatcatggtggaaaatggccgcttttctggattcatcgactgtggccggctgggtgtggcggaccgctatcaggacatagcgttggctacccgtgatattgctgaagagcttggcggcgaatgggctgaccgcttcctcgtgctttacggtatcgccgctcccgattcgcagcgcatcgccttctatcgccttcttgacgagttcttctgagcgggactctggggttcgaaatgaccgaccaagcgacgcccaacctgccatcacgagatttcgattccaccgccgccttctatgaaaggttgggcttcggaatcgttttccgggacgccggctggatgatcctccagcgcggggatctcatgctggagttcttcgcccaccctagggggaggctaactgaaacacggaaggagacaataccggaaggaacccgcgctatgacggcaataaaaagacagaataaaacgcacggtgttgggtcgtttgttcataaacgcggggttcggtcccagggctggcactctgtcgataccccaccgagaccccattggggccaatacgcccgcgtttcttccttttccccaccccaccccccaagttcgggtgaaggcccagggctcgcagccaacgtcggggcggcaggccctgccatagcctcaggttactcatatatactttagattgatttaaaacttcatttttaatttaaaaggatctaggtgaagatcctttttgataatctcatgaccaaaatcccttaacgtgagttttcgttccactgagcgtcagaccccgtagaaaagatcaaaggatcttcttgagatcctttttttctgcgcgtaatctgctgcttgcaaacaaaaaaaccaccgctaccagcggtggtttgtttgccggatcaagagctaccaactctttttccgaaggtaactggcttcagcagagcgcagataccaaatactgttcttctagtgtagccgtagttaggccaccacttcaagaactctgtagcaccgcctacatacctcgctctgctaatcctgttaccagtggctgctgccagtggcgataagtcgtgtcttaccgggttggactcaagacgatagttaccggataaggcgcagcggtcgggctgaacggggggttcgtgcacacagcccagcttggagcgaacgacctacaccgaactgagatacctacagcgtgagctatgagaaagcgccacgcttcccgaagggagaaaggcggacaggtatccggtaagcggcagggtcggaacaggagagcgcacgagggagcttccagggggaaacgcctggtatctttatagtcctgtcgggtttcgccacctctgacttgagcgtcgatttttgtgatgctcgtcaggggggcggagcctatggaaaaacgccagcaacgcggcctttttacggttcctggccttttgctggccttttgctcacatgttctttcctgcgttatcccctgattctgtggataaccgtattaccgccatgcattagttattaatagtaatcaattacggggtcattagttcatagcccatatatggagttccgcgttacataacttacggtaaatggcccgcctggctgaccgcccaacgacccccgcccattgacgtcaataatgacgtatgttcccatagtaacgccaatagggactttccattgacgtcaatgggtggagtatttacggtaaactgcccacttggcagtacatcaa

SEQ ID NO: 55 - DNA, 5768 bp, Artificial Sequence
  Synthetic
gtgtatcatatgccaagtacgccccctattgacgtcaatgacggtaaatggcccgcctggcattatgcccagtacatgaccttatgggactttcctacttggcagtacatctacgtattagtcatcgctattaccatggtgatgcggttttggcagtacatcaatgggcgtggatagcggtttgactcacggggatttccaagtctccaccccattgacgtcaatgggagtttgttttggcaccaaaatcaacgggactttccaaaatgtcgtaacaactccgccccattgacgcaaatgggcggtaggcgtgtacggtgggaggtctatataagcagagctggtttagtgaaccgtcagatccgctagcgctaccggactcagatctcgagctcatgggggactggtctttccttgggaattttctcgaagaggtgcataaacattcaacagtagttggtaaagtatggttgactgtgctcttcattttccgaatgttggtcttgggcacggcggcagaatcaagctggggagatgaacaggctgactttcgatgtgacaccatacagcccggttgtcaaaacgtctgctacgatcaagcattccctattagccatatccgctactgggttctccagataatctttgtgtcaacaccctcattggtatacatgggccacgcgatgcacacggtccggatgcaggaaaaaaggaaactccgcgaggcggagcgggcaaaagaagttaggggctcagggtcatatgaatatcccgttgcggagaaggccgaactttcctgttgggaagaaggcaatggtagaattgcattgcaaggtacactcttgaacacatacgtgtgtagtattctgatacgaactacgatggaggtgggtttcatcgtagggcaatacttcatctatgggatcttcctgacgaccctccatgtatgccgacgctcaccatgtccacatccagtgaactgctacgtgtctcgaccaactgagaaaaatgtattcatagtcttcatgctggcggtagcagctctgagcctgctgctgtctttggcggagctgtaccacctggggtggaagaaaattaggcaacgattcgtgaagccgcgacagcatatggcaaaatgtcaattgagcggtccctctgttggcatagttcaatcatgcaccccgccgccagattttaatcaatgcttggaaaacgggcctggaggcaagtttttcaatccattttctaacaacatggcctcacagcaaaacacagacaacttggtaacagaacaagtgagaggccaagagcagacgcctggcgagggttttatacaggtgcgctatggacagaagccagaggtacccaacggcgtttcaccagggcaccgactgccgcacggatatcactccgacaaacggagactgtctaaagcttcctccaaggcccgcagtgatgacttgagcgtagatccaccggtcgccaccatggtgagcaagggcgaggagctgttcaccggggtggtgcccatcctggtcgagctggacggcgacgtaaacggccacaagttcagcgtgtccggcgagggcgagggcgatgccacctacggcaagctgaccctgaagttcatctgcaccaccggcaagctgcccgtgccctggcccaccctcgtgaccaccttgacctacggcgtgcagtgcttcgcccgctaccccgaccacatgaagcagcacgacttcttcaagtccgccatgcccgaaggctacgtccaggagcgcaccatcttcttcaaggacgacggcaactacaagacccgcgccgaggtgaagttcgagggcgacaccctggtgaaccgcatcgagctgaagggcatcgacttcaaggaggacggcaacatcctggggcacaagctggagtacaactacaacagccacaaggtctatatcaccgccgacaagcagaagaacggcatcaaggtgaacttcaagacccgccacaacatcgaggacggcagcgtgcagctcgccgaccactaccagcagaacacccccatcggcgacggccccgtgctgctgcccgacaaccactacctgagcacccagtccaagctgagcaaagaccccaacgagaagcgcgatcacatggtcctgctggagttcgtgaccgccgccgggatcactctcggcatggacgagctgtacaagtaaagcggccgcgactctagatcataatcagccataccacatttgtagaggttttacttgctttaaaaaacctcccacacctccccctgaacctgaaacataaaatgaatgcaattgttgttgttaacttgtttattgcagcttataatggttacaaataaagcaatagcatcacaaatttcacaaataaagcatttttttcactgcattctagttgtggtttgtccaaactcatcaatgtatcttaaggcgtaaattgtaagcgttaatattttgttaaaattcgcgttaaatttttgttaaatcagctcattttttaaccaataggccgaaatcggcaaaatcccttataaatcaaaagaatagaccgagatagggttgagtgttgttccagtttggaacaagagtccactattaaagaacgtggactccaacgtcaaagggcgaaaaaccgtctatcagggcgatggcccactacgtgaaccatcaccctaatcaagttttttggggtcgaggtgccgtaaagcactaaatcggaaccctaaagggagcccccgatttagagcttgacggggaaagccggcgaacgtggcgagaaaggaagggaagaaagcgaaaggagcgggcgctagggcgctggcaagtgtagcggtcacgctgcgcgtaaccaccacacccgccgcgcttaatgcgccgctacagggcgcgtcaggtggcacttttcggggaaatgtgcgcggaacccctatttgtttatttttctaaatacattcaaatatgtatccgctcatgagacaataaccctgataaatgcttcaataatattgaaaaaggaagagtcctgaggcggaaagaaccagctgtggaatgtgtgtcagttagggtgtggaaagtccccaggctccccagcaggcagaagtatgcaaagcatgcatctcaattagtcagcaaccaggtgtggaaagtccccaggctccccagcaggcagaagtatgcaaagcatgcatctcaattagtcagcaaccatagtcccgcccctaactccgcccatcccgcccctaactccgcccagttccgcccattctccgccccatggctgactaattttttttatttatgcagaggccgaggccgcctcggcctctgagctattccagaagtagtgaggaggcttttttggaggcctaggcttttgcaaagatcgatcaagagacaggatgaggatcgtttcgcatgattgaacaagatggattgcacgcaggttctccggccgcttgggtggagaggctattcggctatgactgggcacaacagacaatcggctgctctgatgccgccgtgttccggctgtcagcgcaggggcgcccggttctttttgtcaagaccgacctgtccggtgccctgaatgaactgcaagacgaggcagcgcggctatcgtggctggccacgacgggcgttccttgcgcagctgtgctcgacgttgtcactgaagcgggaagggactggctgctattgggcgaagtgccggggcaggatctcctgtcatctcaccttgctcctgccgagaaagtatccatcatggctgatgcaatgcggcggctgcatacgcttgatccggctacctgcccattcgaccaccaagcgaaacatcgcatcgagcgagcacgtactcggatggaagccggtcttgtcgatcaggatgatctggacgaagagcatcaggggctcgcgccagccgaactgttcgccaggctcaaggcgagcatgcccgacggcgaggatctcgtcgtgacccatggcgatgcctgcttgccgaatatcatggtggaaaatggccgcttttctggattcatcgactgtggccggctgggtgtggcggaccgctatcaggacatagcgttggctacccgtgatattgctgaagagcttggcggcgaatgggctgaccgcttcctcgtgctttacggtatcgccgctcccgattcgcagcgcatcgccttctatcgccttcttgacgagttcttctgagcgggactctggggttcgaaatgaccgaccaagcgacgcccaacctgccatcacgagatttcgattccaccgccgccttctatgaaaggttgggcttcggaatcgttttccgggacgccggctggatgatcctccagcgcggggatctcatgctggagttcttcgcccaccctagggggaggctaactgaaacacggaaggagacaataccggaaggaacccgcgctatgacggcaataaaaagacagaataaaacgcacggtgttgggtcgtttgttcataaacgcggggttcggtcccagggctggcactctgtcgataccccaccgagaccccattggggccaatacgcccgcgtttcttccttttccccaccccaccccccaagttcgggtgaaggcccagggctcgcagccaacgtcggggcggcaggccctgccatagcctcaggttactcatatatactttagattgatttaaaacttcatttttaatttaaaaggatctaggtgaagatcctttttgataatctcatgaccaaaatcccttaacgtgagttttcgttccactgagcgtcagaccccgtagaaaagatcaaaggatcttcttgagatcctttttttctgcgcgtaatctgctgcttgcaaacaaaaaaaccaccgctaccagcggtggtttgtttgccggatcaagagctaccaactctttttccgaaggtaactggcttcagcagagcgcagataccaaatactgttcttctagtgtagccgtagttaggccaccacttcaagaactctgtagcaccgcctacatacctcgctctgctaatcctgttaccagtggctgctgccagtggcgataagtcgtgtcttaccgggttggactcaagacgatagttaccggataaggcgcagcggtcgggctgaacggggggttcgtgcacacagcccagcttggagcgaacgacctacaccgaactgagatacctacagcgtgagctatgagaaagcgccacgcttcccgaagggagaaaggcggacaggtatccggtaagcggcagggtcggaacaggagagcgcacgagggagcttccagggggaaacgcctggtatctttatagtcctgtcgggtttcgccacctctgacttgagcgtcgatttttgtgatgctcgtcaggggggcggagcctatggaaaaacgccagcaacgcggcctttttacggttcctggccttttgctggccttttgctcacatgttctttcctgcgttatcccctgattctgtggataaccgtattaccgccatgcattagttattaatagtaatcaattacggggtcattagttcatagcccatatatggagttccgcgttacataacttacggtaaatggcccgcctggctgaccgcccaacgacccccgcccattgacgtcaataatgacgtatgttcccatagtaacgccaatagggactttccattgacgtcaatgggtggagtatttacggtaaactgcccacttggcagtacatcaa

SEQ ID NO: 56 - DNA, 5803 bp, Artificial Sequence
  Synthetic
gtgtatcatatgccaagtacgccccctattgacgtcaatgacggtaaatggcccgcctggcattatgcccagtacatgaccttatgggactttcctacttggcagtacatctacgtattagtcatcgctattaccatggtgatgcggttttggcagtacatcaatgggcgtggatagcggtttgactcacggggatttccaagtctccaccccattgacgtcaatgggagtttgttttggcaccaaaatcaacgggactttccaaaatgtcgtaacaactccgccccattgacgcaaatgggcggtaggcgtgtacggtgggaggtctatataagcagagctggtttagtgaaccgtcagatccgctagcgctaccggactcagatctcgagctcatggaaggcgtcgacttgctggggttcctcataattacattgaactgtaatgtgactatggttgggaaactctggttcgttcttacgatgttgctgagaatgctcgtcatcgtcttggcgggacggccggtctatcaggacgagcaagaaagattcgtatgcaacaccctccaacccggttgtgccaatgtgtgttatgacgtattcagtcctgtttctcatctgagattttggcttatccaaggcgtctgcgtattgctgccgagcgctgtattctccgtatacgtgcttcatcgaggtgcgacactggcagctctcgggcctagaaggtgccccgatcccagagaaccggcaagcggccaacggcgatgtccgagaccttttggggagagggggggacttcaggtccccgatttttctgcgggttatataatacatttgctcttgcggaccctgttggaagctgcttttggagcactgcactattttctttttgggtttcttgcgccgaaaaagtttccatgcacgcggcccccctgcacaggcgtggtggattgctatgtttcacgaccaacggaaaaatcccttctgatgcttttcctttgggctgtaagtgcactcagctttctccttgggctggctgatctggtatgtagccttcgcaggagaatgagacgccggcccggacccccgactagcccgtccattcgcaagcagtccggggcgagtggccacgccgaaggacgaaggaccgacgaagagggagggcgcgaagaagagggcgctccggcaccacccggggctagagccggaggagaaggggccggttctccgcgcagaacaagcagggtaagtgggcatacgaaaataccggacgaagatgagtccgaggtcactagttctgcctccgaaaaattggggaggcaaccaagaggtcgcccacatagagaggcggcacaggatccacgaggatccggaagtgaagagcaaccgagcgctgcgcctagccgattggcggccccccctagctgctcaagcctccaaccgcccgaccccccggcttccagctccggtgctccacatttgcgcgcccgcaagtctgaatgggtagatccaccggtcgccaccatggtgagcaagggcgaggagctgttcaccggggtggtgcccatcctggtcgagctggacggcgacgtaaacggccacaagttcagcgtgtccggcgagggcgagggcgatgccacctacggcaagctgaccctgaagttcatctgcaccaccggcaagctgcccgtgccctggcccaccctcgtgaccaccttgacctacggcgtgcagtgcttcgcccgctaccccgaccacatgaagcagcacgacttcttcaagtccgccatgcccgaaggctacgtccaggagcgcaccatcttcttcaaggacgacggcaactacaagacccgcgccgaggtgaagttcgagggcgacaccctggtgaaccgcatcgagctgaagggcatcgacttcaaggaggacggcaacatcctggggcacaagctggagtacaactacaacagccacaaggtctatatcaccgccgacaagcagaagaacggcatcaaggtgaacttcaagacccgccacaacatcgaggacggcagcgtgcagctcgccgaccactaccagcagaacacccccatcggcgacggccccgtgctgctgcccgacaaccactacctgagcacccagtccaagctgagcaaagaccccaacgagaagcgcgatcacatggtcctgctggagttcgtgaccgccgccgggatcactctcggcatggacgagctgtacaagtaagcggccgcgactctagatcataatcagccataccacatttgtagaggttttacttgctttaaaaaacctcccacacctccccctgaacctgaaacataaaatgaatgcaattgttgttgttaacttgtttattgcagcttataatggttacaaataaagcaatagcatcacaaatttcacaaataaagcatttttttcactgcattctagttgtggtttgtccaaactcatcaatgtatcttaaggcgtaaattgtaagcgttaatattttgttaaaattcgcgttaaatttttgttaaatcagctcattttttaaccaataggccgaaatcggcaaaatcccttataaatcaaaagaatagaccgagatagggttgagtgttgttccagtttggaacaagagtccactattaaagaacgtggactccaacgtcaaagggcgaaaaaccgtctatcagggcgatggcccactacgtgaaccatcaccctaatcaagttttttggggtcgaggtgccgtaaagcactaaatcggaaccctaaagggagcccccgatttagagcttgacggggaaagccggcgaacgtggcgagaaaggaagggaagaaagcgaaaggagcgggcgctagggcgctggcaagtgtagcggtcacgctgcgcgtaaccaccacacccgccgcgcttaatgcgccgctacagggcgcgtcaggtggcacttttcggggaaatgtgcgcggaacccctatttgtttatttttctaaatacattcaaatatgtatccgctcatgagacaataaccctgataaatgcttcaataatattgaaaaaggaagagtcctgaggcggaaagaaccagctgtggaatgtgtgtcagttagggtgtggaaagtccccaggctccccagcaggcagaagtatgcaaagcatgcatctcaattagtcagcaaccaggtgtggaaagtccccaggctccccagcaggcagaagtatgcaaagcatgcatctcaattagtcagcaaccatagtcccgcccctaactccgcccatcccgcccctaactccgcccagttccgcccattctccgccccatggctgactaattttttttatttatgcagaggccgaggccgcctcggcctctgagctattccagaagtagtgaggaggcttttttggaggcctaggcttttgcaaagatcgatcaagagacaggatgaggatcgtttcgcatgattgaacaagatggattgcacgcaggttctccggccgcttgggtggagaggctattcggctatgactgggcacaacagacaatcggctgctctgatgccgccgtgttccggctgtcagcgcaggggcgcccggttctttttgtcaagaccgacctgtccggtgccctgaatgaactgcaagacgaggcagcgcggctatcgtggctggccacgacgggcgttccttgcgcagctgtgctcgacgttgtcactgaagcgggaagggactggctgctattgggcgaagtgccggggcaggatctcctgtcatctcaccttgctcctgccgagaaagtatccatcatggctgatgcaatgcggcggctgcatacgcttgatccggctacctgcccattcgaccaccaagcgaaacatcgcatcgagcgagcacgtactcggatggaagccggtcttgtcgatcaggatgatctggacgaagagcatcaggggctcgcgccagccgaactgttcgccaggctcaaggcgagcatgcccgacggcgaggatctcgtcgtgacccatggcgatgcctgcttgccgaatatcatggtggaaaatggccgcttttctggattcatcgactgtggccggctgggtgtggcggaccgctatcaggacatagcgttggctacccgtgatattgctgaagagcttggcggcgaatgggctgaccgcttcctcgtgctttacggtatcgccgctcccgattcgcagcgcatcgccttctatcgccttcttgacgagttcttctgagcgggactctggggttcgaaatgaccgaccaagcgacgcccaacctgccatcacgagatttcgattccaccgccgccttctatgaaaggttgggcttcggaatcgttttccgggacgccggctggatgatcctccagcgcggggatctcatgctggagttcttcgcccaccctagggggaggctaactgaaacacggaaggagacaataccggaaggaacccgcgctatgacggcaataaaaagacagaataaaacgcacggtgttgggtcgtttgttcataaacgcggggttcggtcccagggctggcactctgtcgataccccaccgagaccccattggggccaatacgcccgcgtttcttccttttccccaccccaccccccaagttcgggtgaaggcccagggctcgcagccaacgtcggggcggcaggccctgccatagcctcaggttactcatatatactttagattgatttaaaacttcatttttaatttaaaaggatctaggtgaagatcctttttgataatctcatgaccaaaatcccttaacgtgagttttcgttccactgagcgtcagaccccgtagaaaagatcaaaggatcttcttgagatcctttttttctgcgcgtaatctgctgcttgcaaacaaaaaaaccaccgctaccagcggtggtttgtttgccggatcaagagctaccaactctttttccgaaggtaactggcttcagcagagcgcagataccaaatactgttcttctagtgtagccgtagttaggccaccacttcaagaactctgtagcaccgcctacatacctcgctctgctaatcctgttaccagtggctgctgccagtggcgataagtcgtgtcttaccgggttggactcaagacgatagttaccggataaggcgcagcggtcgggctgaacggggggttcgtgcacacagcccagcttggagcgaacgacctacaccgaactgagatacctacagcgtgagctatgagaaagcgccacgcttcccgaagggagaaaggcggacaggtatccggtaagcggcagggtcggaacaggagagcgcacgagggagcttccagggggaaacgcctggtatctttatagtcctgtcgggtttcgccacctctgacttgagcgtcgatttttgtgatgctcgtcaggggggcggagcctatggaaaaacgccagcaacgcggcctttttacggttcctggccttttgctggccttttgctcacatgttctttcctgcgttatcccctgattctgtggataaccgtattaccgccatgcattagttattaatagtaatcaattacggggtcattagttcatagcccatatatggagttccgcgttacataacttacggtaaatggcccgcctggctgaccgcccaacgacccccgcccattgacgtcaataatgacgtatgttcccatagtaacgccaatagggactttccattgacgtcaatgggtggagtatttacggtaaactgcccacttggcagtacatcaa

SEQ ID NO: 57 - DNA, 5836 bp, Artificial Sequence
  Synthetic
atatatggagttccgcgttacataacttacggtaaatggcccgcctggctgaccgcccaacgacccccgcccattgacgtcaataatgacgtatgttcccatagtaacgccaatagggactttccattgacgtcaatgggtggagtatttacggtaaactgcccacttggcagtacatcaagtgtatcatatgccaagtacgccccctattgacgtcaatgacggtaaatggcccgcctggcattatgcccagtacatgaccttatgggactttcctacttggcagtacatctacgtattagtcatcgctattaccatggtgatgcggttttggcagtacatcaatgggcgtggatagcggtttgactcacggggatttccaagtctccaccccattgacgtcaatgggagtttgttttggcaccaaaatcaacgggactttccaaaatgtcgtaacaactccgccccattgacgcaaatgggcggtaggcgtgtacggtgggaggtctatataagcagagctggtttagtgaaccgtcagatccgctagcgctaccggactcagatctcgagatgggggattggtcagctcttggaaagctccttgacaaagtacaggcgtacagtactgccggaggaaaagtgtggctcagtgtactgtttatattccggattctgcttctcggcacagccgtggagagcgcatggggtgacgaacaaagcgcgttccggtgcaacacccaacaacctggatgtgaaaacgtttgttacgataagtcattccctatctcccacgtaaggttctgggtgttgcagataatcttcgtttctgtacccacccttctttatcttgcccatgtgttttacgtaatgagaaaggaggagaaacttaataagaaagaggaggaattgaaagtcgcgcaaacggatggcgttaatgtggatatgcatctgaagcaaatagagataaagaaattcaaatatggtattgaagaacatggaaaagtaaaaatgagaggtggtttgcttcggacgtatattatctccatactttttaaaagcatatttgaggtagccttcttgctgatacagtggtatatatacggcttttcattgagtgctgtgtacacatgcaagcgcgatccatgcccccatcaagtagattgtttcttgagcagaccgacagaaaaaactatcttcatcatttttatgctggtggtatccctggtttccctggcactcaacataatagaactcttctatgtgttcttcaagggggttaaggacagggtgaaaggtaagtccgacccatatcatgcgacctctggagcgctgtcccctgcaaaggactgtggaagccagaagtacgcctattttaatggatgttccagtcctacagcccctctgagccctatgtctccacccggatataaactggtgaccggtgatcgcaacaattcaagttgcaggaactataataagcaggcttccgaacagaattgggccaattacagtgccgaacaaaaccgaatgggacaagcgggatctaccatttctaattcacacgctcaaccgtttgacttccctgatgacaatcagaacagtaaaaagctcgcggctggccacgaactgcaaccgcttgcgatagtagaccaaagaccgagcagtcgagcgtcttccagagcaagctctcgcccacggccagacgatctggaaatagatccaccggtcgccaccatggtgagcaagggcgaggagctgttcaccggggtggtgcccatcctggtcgagctggacggcgacgtaaacggccacaagttcagcgtgtccggcgagggcgagggcgatgccacctacggcaagctgaccctgaagttcatctgcaccaccggcaagctgcccgtgccctggcccaccctcgtgaccaccttgacctacggcgtgcagtgcttcgcccgctaccccgaccacatgaagcagcacgacttcttcaagtccgccatgcccgaaggctacgtccaggagcgcaccatcttcttcaaggacgacggcaactacaagacccgcgccgaggtgaagttcgagggcgacaccctggtgaaccgcatcgagctgaagggcatcgacttcaaggaggacggcaacatcctggggcacaagctggagtacaactacaacagccacaaggtctatatcaccgccgacaagcagaagaacggcatcaaggtgaacttcaagacccgccacaacatcgaggacggcagcgtgcagctcgccgaccactaccagcagaacacccccatcggcgacggccccgtgctgctgcccgacaaccactacctgagcacccagtccaagctgagcaaagaccccaacgagaagcgcgatcacatggtcctgctggagttcgtgaccgccgccgggatcactctcggcatggacgagctgtacaagtaagcggccgcgactctagatcataatcagccataccacatttgtagaggttttacttgctttaaaaaacctcccacacctccccctgaacctgaaacataaaatgaatgcaattgttgttgttaacttgtttattgcagcttataatggttacaaataaagcaatagcatcacaaatttcacaaataaagcatttttttcactgcattctagttgtggtttgtccaaactcatcaatgtatcttaaggcgtaaattgtaagcgttaatattttgttaaaattcgcgttaaatttttgttaaatcagctcattttttaaccaataggccgaaatcggcaaaatcccttataaatcaaaagaatagaccgagatagggttgagtgttgttccagtttggaacaagagtccactattaaagaacgtggactccaacgtcaaagggcgaaaaaccgtctatcagggcgatggcccactacgtgaaccatcaccctaatcaagttttttggggtcgaggtgccgtaaagcactaaatcggaaccctaaagggagcccccgatttagagcttgacggggaaagccggcgaacgtggcgagaaaggaagggaagaaagcgaaaggagcgggcgctagggcgctggcaagtgtagcggtcacgctgcgcgtaaccaccacacccgccgcgcttaatgcgccgctacagggcgcgtcaggtggcacttttcggggaaatgtgcgcggaacccctatttgtttatttttctaaatacattcaaatatgtatccgctcatgagacaataaccctgataaatgcttcaataatattgaaaaaggaagagtcctgaggcggaaagaaccagctgtggaatgtgtgtcagttagggtgtggaaagtccccaggctccccagcaggcagaagtatgcaaagcatgcatctcaattagtcagcaaccaggtgtggaaagtccccaggctccccagcaggcagaagtatgcaaagcatgcatctcaattagtcagcaaccatagtcccgcccctaactccgcccatcccgcccctaactccgcccagttccgcccattctccgccccatggctgactaattttttttatttatgcagaggccgaggccgcctcggcctctgagctattccagaagtagtgaggaggcttttttggaggcctaggcttttgcaaagatcgatcaagagacaggatgaggatcgtttcgcatgattgaacaagatggattgcacgcaggttctccggccgcttgggtggagaggctattcggctatgactgggcacaacagacaatcggctgctctgatgccgccgtgttccggctgtcagcgcaggggcgcccggttctttttgtcaagaccgacctgtccggtgccctgaatgaactgcaagacgaggcagcgcggctatcgtggctggccacgacgggcgttccttgcgcagctgtgctcgacgttgtcactgaagcgggaagggactggctgctattgggcgaagtgccggggcaggatctcctgtcatctcaccttgctcctgccgagaaagtatccatcatggctgatgcaatgcggcggctgcatacgcttgatccggctacctgcccattcgaccaccaagcgaaacatcgcatcgagcgagcacgtactcggatggaagccggtcttgtcgatcaggatgatctggacgaagagcatcaggggctcgcgccagccgaactgttcgccaggctcaaggcgagcatgcccgacggcgaggatctcgtcgtgacccatggcgatgcctgcttgccgaatatcatggtggaaaatggccgcttttctggattcatcgactgtggccggctgggtgtggcggaccgctatcaggacatagcgttggctacccgtgatattgctgaagagcttggcggcgaatgggctgaccgcttcctcgtgctttacggtatcgccgctcccgattcgcagcgcatcgccttctatcgccttcttgacgagttcttctgagcgggactctggggttcgaaatgaccgaccaagcgacgcccaacctgccatcacgagatttcgattccaccgccgccttctatgaaaggttgggcttcggaatcgttttccgggacgccggctggatgatcctccagcgcggggatctcatgctggagttcttcgcccaccctagggggaggctaactgaaacacggaaggagacaataccggaaggaacccgcgctatgacggcaataaaaagacagaataaaacgcacggtgttgggtcgtttgttcataaacgcggggttcggtcccagggctggcactctgtcgataccccaccgagaccccattggggccaatacgcccgcgtttcttccttttccccaccccaccccccaagttcgggtgaaggcccagggctcgcagccaacgtcggggcggcaggccctgccatagcctcaggttactcatatatactttagattgatttaaaacttcatttttaatttaaaaggatctaggtgaagatcctttttgataatctcatgaccaaaatcccttaacgtgagttttcgttccactgagcgtcagaccccgtagaaaagatcaaaggatcttcttgagatcctttttttctgcgcgtaatctgctgcttgcaaacaaaaaaaccaccgctaccagcggtggtttgtttgccggatcaagagctaccaactctttttccgaaggtaactggcttcagcagagcgcagataccaaatactgttcttctagtgtagccgtagttaggccaccacttcaagaactctgtagcaccgcctacatacctcgctctgctaatcctgttaccagtggctgctgccagtggcgataagtcgtgtcttaccgggttggactcaagacgatagttaccggataaggcgcagcggtcgggctgaacggggggttcgtgcacacagcccagcttggagcgaacgacctacaccgaactgagatacctacagcgtgagctatgagaaagcgccacgcttcccgaagggagaaaggcggacaggtatccggtaagcggcagggtcggaacaggagagcgcacgagggagcttccagggggaaacgcctggtatctttatagtcctgtcgggtttcgccacctctgacttgagcgtcgatttttgtgatgctcgtcaggggggcggagcctatggaaaaacgccagcaacgcggcctttttacggttcctggccttttgctggccttttgctcacatgttctttcctgcgttatcccctgattctgtggataaccgtattaccgccatgcattagttattaatagtaatcaattacggggtcattagttcatagccc

SEQ ID NO: 58 - DNA, 5882 bp, Artificial Sequence
  Synthetic
gtgtatcatatgccaagtacgccccctattgacgtcaatgacggtaaatggcccgcctggcattatgcccagtacatgaccttatgggactttcctacttggcagtacatctacgtattagtcatcgctattaccatggtgatgcggttttggcagtacatcaatgggcgtggatagcggtttgactcacggggatttccaagtctccaccccattgacgtcaatgggagtttgttttggcaccaaaatcaacgggactttccaaaatgtcgtaacaactccgccccattgacgcaaatgggcggtaggcgtgtacggtgggaggtctatataagcagagctggtttagtgaaccgtcagatccgctagcgctaccggactcagatctcgagctcatgtcatggtctttccttacccgcctcttggaagaaatccacaaccactctacctttgtggggaaaatttggcttacagtccttatagtcttccgaatcgttctcacggccgtcggcggcgaaagcatttactatgacgagcagtccaagttcgtttgcaatactgagcaaccaggatgcgagaacgtatgctatgatgcgtttgcccctctgagccatgtaaggttttgggttttccaaataatattggttgccactccgagcgtaatgtatttgggctacgcaatccacaagattgcgaaaatggagcatggtgaggcagacaaaaaggcggctagatcaaagccttatgctatgagatggaaacaacatcgggcactggaagagaccgaagaagacaatgaggaggatccaatgatgtatccagaaatggagctcgaatccgacaaggagaataaggagcaaagtcaaccaaagcctaagcacgatggacggaggaggattcgggaagatggccttatgaagatttatgtgttgcagctgcttgcaagaacggtattcgaagttggatttcttatcggccagtattttctctacggtttccaagttcaccctttctatgtttgttctcgactcccctgcccccacaaaatagactgtttcatcagtaggcccacggaaaaaactatttttttgctgataatgtacggcgtgactggtctttgtcttctgctcaacatatgggaaatgctgcatcttggatttggtaccattagagacagcctcaattccaaaaggagggagctcgaggaccctggcgcttataattacccatttacctggaatactccgtctgccccgccaggttacaacattgcggtcaaaccagatcaaatacagtatactgaactttcaaatgctaagattgcctacaagcagaacaaggctaatacggcacaggaacaacagtacggttcacacgaagaaaacctgccagcggatctcgaggcgttgcagcgagaaatcaggatggcacaagagcgacttgaccttgcagtacaggcatactcccatcagaataacccacatggcccccgcgagaaaaaagcgaaggtagggtcaaaagccggatctaataagtctactgcgtcctccaagagtggggacggcaagacatctgtctggatcgatccaccggtcgccaccatggtgagcaagggcgaggagctgttcaccggggtggtgcccatcctggtcgagctggacggcgacgtaaacggccacaagttcagcgtgtccggcgagggcgagggcgatgccacctacggcaagctgaccctgaagttcatctgcaccaccggcaagctgcccgtgccctggcccaccctcgtgaccaccttgacctacggcgtgcagtgcttcgcccgctaccccgaccacatgaagcagcacgacttcttcaagtccgccatgcccgaaggctacgtccaggagcgcaccatcttcttcaaggacgacggcaactacaagacccgcgccgaggtgaagttcgagggcgacaccctggtgaaccgcatcgagctgaagggcatcgacttcaaggaggacggcaacatcctggggcacaagctggagtacaactacaacagccacaaggtctatatcaccgccgacaagcagaagaacggcatcaaggtgaacttcaagacccgccacaacatcgaggacggcagcgtgcagctcgccgaccactaccagcagaacacccccatcggcgacggccccgtgctgctgcccgacaaccactacctgagcacccagtccaagctgagcaaagaccccaacgagaagcgcgatcacatggtcctgctggagttcgtgaccgccgccgggatcactctcggcatggacgagctgtacaagtaaagcggccgcgactctagatcataatcagccataccacatttgtagaggttttacttgctttaaaaaacctcccacacctccccctgaacctgaaacataaaatgaatgcaattgttgttgttaacttgtttattgcagcttataatggttacaaataaagcaatagcatcacaaatttcacaaataaagcatttttttcactgcattctagttgtggtttgtccaaactcatcaatgtatcttaaggcgtaaattgtaagcgttaatattttgttaaaattcgcgttaaatttttgttaaatcagctcattttttaaccaataggccgaaatcggcaaaatcccttataaatcaaaagaatagaccgagatagggttgagtgttgttccagtttggaacaagagtccactattaaagaacgtggactccaacgtcaaagggcgaaaaaccgtctatcagggcgatggcccactacgtgaaccatcaccctaatcaagttttttggggtcgaggtgccgtaaagcactaaatcggaaccctaaagggagcccccgatttagagcttgacggggaaagccggcgaacgtggcgagaaaggaagggaagaaagcgaaaggagcgggcgctagggcgctggcaagtgtagcggtcacgctgcgcgtaaccaccacacccgccgcgcttaatgcgccgctacagggcgcgtcaggtggcacttttcggggaaatgtgcgcggaacccctatttgtttatttttctaaatacattcaaatatgtatccgctcatgagacaataaccctgataaatgcttcaataatattgaaaaaggaagagtcctgaggcggaaagaaccagctgtggaatgtgtgtcagttagggtgtggaaagtccccaggctccccagcaggcagaagtatgcaaagcatgcatctcaattagtcagcaaccaggtgtggaaagtccccaggctccccagcaggcagaagtatgcaaagcatgcatctcaattagtcagcaaccatagtcccgcccctaactccgcccatcccgcccctaactccgcccagttccgcccattctccgccccatggctgactaattttttttatttatgcagaggccgaggccgcctcggcctctgagctattccagaagtagtgaggaggcttttttggaggcctaggcttttgcaaagatcgatcaagagacaggatgaggatcgtttcgcatgattgaacaagatggattgcacgcaggttctccggccgcttgggtggagaggctattcggctatgactgggcacaacagacaatcggctgctctgatgccgccgtgttccggctgtcagcgcaggggcgcccggttctttttgtcaagaccgacctgtccggtgccctgaatgaactgcaagacgaggcagcgcggctatcgtggctggccacgacgggcgttccttgcgcagctgtgctcgacgttgtcactgaagcgggaagggactggctgctattgggcgaagtgccggggcaggatctcctgtcatctcaccttgctcctgccgagaaagtatccatcatggctgatgcaatgcggcggctgcatacgcttgatccggctacctgcccattcgaccaccaagcgaaacatcgcatcgagcgagcacgtactcggatggaagccggtcttgtcgatcaggatgatctggacgaagagcatcaggggctcgcgccagccgaactgttcgccaggctcaaggcgagcatgcccgacggcgaggatctcgtcgtgacccatggcgatgcctgcttgccgaatatcatggtggaaaatggccgcttttctggattcatcgactgtggccggctgggtgtggcggaccgctatcaggacatagcgttggctacccgtgatattgctgaagagcttggcggcgaatgggctgaccgcttcctcgtgctttacggtatcgccgctcccgattcgcagcgcatcgccttctatcgccttcttgacgagttcttctgagcgggactctggggttcgaaatgaccgaccaagcgacgcccaacctgccatcacgagatttcgattccaccgccgccttctatgaaaggttgggcttcggaatcgttttccgggacgccggctggatgatcctccagcgcggggatctcatgctggagttcttcgcccaccctagggggaggctaactgaaacacggaaggagacaataccggaaggaacccgcgctatgacggcaataaaaagacagaataaaacgcacggtgttgggtcgtttgttcataaacgcggggttcggtcccagggctggcactctgtcgataccccaccgagaccccattggggccaatacgcccgcgtttcttccttttccccaccccaccccccaagttcgggtgaaggcccagggctcgcagccaacgtcggggcggcaggccctgccatagcctcaggttactcatatatactttagattgatttaaaacttcatttttaatttaaaaggatctaggtgaagatcctttttgataatctcatgaccaaaatcccttaacgtgagttttcgttccactgagcgtcagaccccgtagaaaagatcaaaggatcttcttgagatcctttttttctgcgcgtaatctgctgcttgcaaacaaaaaaaccaccgctaccagcggtggtttgtttgccggatcaagagctaccaactctttttccgaaggtaactggcttcagcagagcgcagataccaaatactgttcttctagtgtagccgtagttaggccaccacttcaagaactctgtagcaccgcctacatacctcgctctgctaatcctgttaccagtggctgctgccagtggcgataagtcgtgtcttaccgggttggactcaagacgatagttaccggataaggcgcagcggtcgggctgaacggggggttcgtgcacacagcccagcttggagcgaacgacctacaccgaactgagatacctacagcgtgagctatgagaaagcgccacgcttcccgaagggagaaaggcggacaggtatccggtaagcggcagggtcggaacaggagagcgcacgagggagcttccagggggaaacgcctggtatctttatagtcctgtcgggtttcgccacctctgacttgagcgtcgatttttgtgatgctcgtcaggggggcggagcctatggaaaaacgccagcaacgcggcctttttacggttcctggccttttgctggccttttgctcacatgttctttcctgcgttatcccctgattctgtggataaccgtattaccgccatgcattagttattaatagtaatcaattacggggtcattagttcatagcccatatatggagttccgcgttacataacttacggtaaatggcccgcctggctgaccgcccaacgacccccgcccattgacgtcaataatgacgtatgttcccatagtaacgccaatagggactttccattgacgtcaatgggtggagtatttacggtaaactgcccacttggcagtacatcaa

SEQ ID NO: 59 - DNA, 5999 bp, Artificial Sequence
  Synthetic
gtgtatcatatgccaagtacgccccctattgacgtcaatgacggtaaatggcccgcctggcattatgcccagtacatgaccttatgggactttcctacttggcagtacatctacgtattagtcatcgctattaccatggtgatgcggttttggcagtacatcaatgggcgtggatagcggtttgactcacggggatttccaagtctccaccccattgacgtcaatgggagtttgttttggcaccaaaatcaacgggactttccaaaatgtcgtaacaactccgccccattgacgcaaatgggcggtaggcgtgtacggtgggaggtctatataagcagagctggtttagtgaaccgtcagatccgctagcgctaccggactcagatctcgagctcatgggggattggagctttttgggtagactgcttgaaaacgcgcaagaacattctactgttataggtaaggtgtggctgacagtccttttcatattccggattttggtgctgggggccgcggcggaagacgtttggggtgatgaacaaagtgacttcacatgtaacacacaacaaccgggttgtgagaacgtatgctacgaccgcgcttttccaatatcccatataaggttttgggcactccagattatttttgtatctacgccgactctgatttatcttggacacgttctccacattgtgcgaatggaagagaagaagaaggaacgagaagaagaggaacagctcaagcgagagagcccatcccccaaggagcccccgcaagataaccccagttctcgagatgatcggggtagagttcggatggccggtgcgttgctccgcacttatgtctttaacatcatatttaaaacgctcttcgaggtcggattcatagcgggtcagtactttctttacggtttcgagctcaagcccctctaccgctgcgaccgatggccttgccctaacacggtagattgctttatcagcagaccgaccgaaaaaacgatttttataatctttatgcttgctgttgcttgtgcgtctctcctcctcaacatgttggaaatctaccatctcggttggaagaagctcaagcagggagttacttcaaggctgggtccggatgcatctgaggctccgttgggcacggcggatcctccgcctctgccacccagttctaggcctccagctgtggccattggcttcccgccatattacgcacataccgccgcaccgttggggcaggccagggcagttggttaccccggggcccctcctccagcagctgatttcaagctgcttgcactcacagaggcgcggggtaagggacagagcgctaagctttacaacggccatcatcacctgctgatgacggagcagaattgggccaaccaagctgcagaacgacaaccgcccgcacttaaggcctatcctgcggccagcacgcctgccgcaccctcaccggtagggtcatcttcccctccccttgcgcacgaggcggaagcaggtgctgctcccctgcttctggatggatccggtagttccttggaaggctccgcattggcggggacacccgaggaagaggaacaggccgtcaccaccgcagctcaaatgcatcaacccccgcttccgctgggagatcctggtagggcctcaaaagcaagccgcgcctcttccggtagggcgcgaccagaagatctcgcaattgatccaccggtcgccaccatggtgagcaagggcgaggagctgttcaccggggtggtgcccatcctggtcgagctggacggcgacgtaaacggccacaagttcagcgtgtccggcgagggcgagggcgatgccacctacggcaagctgaccctgaagttcatctgcaccaccggcaagctgcccgtgccctggcccaccctcgtgaccaccttgacctacggcgtgcagtgcttcgcccgctaccccgaccacatgaagcagcacgacttcttcaagtccgccatgcccgaaggctacgtccaggagcgcaccatcttcttcaaggacgacggcaactacaagacccgcgccgaggtgaagttcgagggcgacaccctggtgaaccgcatcgagctgaagggcatcgacttcaaggaggacggcaacatcctggggcacaagctggagtacaactacaacagccacaaggtctatatcaccgccgacaagcagaagaacggcatcaaggtgaacttcaagacccgccacaacatcgaggacggcagcgtgcagctcgccgaccactaccagcagaacacccccatcggcgacggccccgtgctgctgcccgacaaccactacctgagcacccagtccaagctgagcaaagaccccaacgagaagcgcgatcacatggtcctgctggagttcgtgaccgccgccgggatcactctcggcatggacgagctgtacaagtaaagcggccgcgactctagatcataatcagccataccacatttgtagaggttttacttgctttaaaaaacctcccacacctccccctgaacctgaaacataaaatgaatgcaattgttgttgttaacttgtttattgcagcttataatggttacaaataaagcaatagcatcacaaatttcacaaataaagcatttttttcactgcattctagttgtggtttgtccaaactcatcaatgtatcttaaggcgtaaattgtaagcgttaatattttgttaaaattcgcgttaaatttttgttaaatcagctcattttttaaccaataggccgaaatcggcaaaatcccttataaatcaaaagaatagaccgagatagggttgagtgttgttccagtttggaacaagagtccactattaaagaacgtggactccaacgtcaaagggcgaaaaaccgtctatcagggcgatggcccactacgtgaaccatcaccctaatcaagttttttggggtcgaggtgccgtaaagcactaaatcggaaccctaaagggagcccccgatttagagcttgacggggaaagccggcgaacgtggcgagaaaggaagggaagaaagcgaaaggagcgggcgctagggcgctggcaagtgtagcggtcacgctgcgcgtaaccaccacacccgccgcgcttaatgcgccgctacagggcgcgtcaggtggcacttttcggggaaatgtgcgcggaacccctatttgtttatttttctaaatacattcaaatatgtatccgctcatgagacaataaccctgataaatgcttcaataatattgaaaaaggaagagtcctgaggcggaaagaaccagctgtggaatgtgtgtcagttagggtgtggaaagtccccaggctccccagcaggcagaagtatgcaaagcatgcatctcaattagtcagcaaccaggtgtggaaagtccccaggctccccagcaggcagaagtatgcaaagcatgcatctcaattagtcagcaaccatagtcccgcccctaactccgcccatcccgcccctaactccgcccagttccgcccattctccgccccatggctgactaattttttttatttatgcagaggccgaggccgcctcggcctctgagctattccagaagtagtgaggaggcttttttggaggcctaggcttttgcaaagatcgatcaagagacaggatgaggatcgtttcgcatgattgaacaagatggattgcacgcaggttctccggccgcttgggtggagaggctattcggctatgactgggcacaacagacaatcggctgctctgatgccgccgtgttccggctgtcagcgcaggggcgcccggttctttttgtcaagaccgacctgtccggtgccctgaatgaactgcaagacgaggcagcgcggctatcgtggctggccacgacgggcgttccttgcgcagctgtgctcgacgttgtcactgaagcgggaagggactggctgctattgggcgaagtgccggggcaggatctcctgtcatctcaccttgctcctgccgagaaagtatccatcatggctgatgcaatgcggcggctgcatacgcttgatccggctacctgcccattcgaccaccaagcgaaacatcgcatcgagcgagcacgtactcggatggaagccggtcttgtcgatcaggatgatctggacgaagagcatcaggggctcgcgccagccgaactgttcgccaggctcaaggcgagcatgcccgacggcgaggatctcgtcgtgacccatggcgatgcctgcttgccgaatatcatggtggaaaatggccgcttttctggattcatcgactgtggccggctgggtgtggcggaccgctatcaggacatagcgttggctacccgtgatattgctgaagagcttggcggcgaatgggctgaccgcttcctcgtgctttacggtatcgccgctcccgattcgcagcgcatcgccttctatcgccttcttgacgagttcttctgagcgggactctggggttcgaaatgaccgaccaagcgacgcccaacctgccatcacgagatttcgattccaccgccgccttctatgaaaggttgggcttcggaatcgttttccgggacgccggctggatgatcctccagcgcggggatctcatgctggagttcttcgcccaccctagggggaggctaactgaaacacggaaggagacaataccggaaggaacccgcgctatgacggcaataaaaagacagaataaaacgcacggtgttgggtcgtttgttcataaacgcggggttcggtcccagggctggcactctgtcgataccccaccgagaccccattggggccaatacgcccgcgtttcttccttttccccaccccaccccccaagttcgggtgaaggcccagggctcgcagccaacgtcggggcggcaggccctgccatagcctcaggttactcatatatactttagattgatttaaaacttcatttttaatttaaaaggatctaggtgaagatcctttttgataatctcatgaccaaaatcccttaacgtgagttttcgttccactgagcgtcagaccccgtagaaaagatcaaaggatcttcttgagatcctttttttctgcgcgtaatctgctgcttgcaaacaaaaaaaccaccgctaccagcggtggtttgtttgccggatcaagagctaccaactctttttccgaaggtaactggcttcagcagagcgcagataccaaatactgttcttctagtgtagccgtagttaggccaccacttcaagaactctgtagcaccgcctacatacctcgctctgctaatcctgttaccagtggctgctgccagtggcgataagtcgtgtcttaccgggttggactcaagacgatagttaccggataaggcgcagcggtcgggctgaacggggggttcgtgcacacagcccagcttggagcgaacgacctacaccgaactgagatacctacagcgtgagctatgagaaagcgccacgcttcccgaagggagaaaggcggacaggtatccggtaagcggcagggtcggaacaggagagcgcacgagggagcttccagggggaaacgcctggtatctttatagtcctgtcgggtttcgccacctctgacttgagcgtcgatttttgtgatgctcgtcaggggggcggagcctatggaaaaacgccagcaacgcggcctttttacggttcctggccttttgctggccttttgctcacatgttctttcctgcgttatcccctgattctgtggataaccgtattaccgccatgcattagttattaatagtaatcaattacggggtcattagttcatagcccatatatggagttccgcgttacataacttacggtaaatggcccgcctggctgaccgcccaacgacccccgcccattgacgtcaataatgacgtatgttcccatagtaacgccaatagggactttccattgacgtcaatgggtggagtatttacggtaaactgcccacttggcagtacatcaa

SEQ ID NO: 60 - DNA, 6011 bp, Artificial Sequence
  Synthetic
gtgtatcatatgccaagtacgccccctattgacgtcaatgacggtaaatggcccgcctggcattatgcccagtacatgaccttatgggactttcctacttggcagtacatctacgtattagtcatcgctattaccatggtgatgcggttttggcagtacatcaatgggcgtggatagcggtttgactcacggggatttccaagtctccaccccattgacgtcaatgggagtttgttttggcaccaaaatcaacgggactttccaaaatgtcgtaacaactccgccccattgacgcaaatgggcggtaggcgtgtacggtgggaggtctatataagcagagctggtttagtgaaccgtcagatccgctagcgctaccggactcagatctcgagctcatgaccaatatgagttggtccttcctcacaagactgttggaggagatccacaaccacagtactttcgtaggtaaggtctggctgacagttctcgtggtttttagaatagtgcttacagctgtcgggggtgaggcgatttattctgacgaacaagctaaattcacatgtaacacgagacaaccgggatgtgataatgtgtgctatgacgcattcgctccactgtctcacgtgcggttttgggtttttcaaattgtggtaatttccactccttctgtgatgtatctcggctatgccgtccatcgacttgctcgcgcaagcgaacaagaaagacgccgcgcgctgcgacgacggcccgggccccggagagcccccagagcccaccttccacctccacacgctggctggccagaaccggccgatctgggtgaggaggaaccgatgttgggtttgggagaggaagaggaggaagaagagactggagcagccgaaggagcaggggaggaagctgaggaggcaggcgcagaagaagcatgtacaaaggccgtaggtgccgatggcaaagccgcaggcacgcctggaccaacaggccaacatgatggccggagaaggatacagcgagagggtctgatgagggtatatgtcgctcaactggtagctcgcgcggctttcgaggtggcgttcctcgtcggtcaatatctgctctatggtttcgaggtaagaccattttttccatgtagccggcaaccttgcccgcacgtcgtggactgctttgtatctaggccaacggaaaagacagtttttttgttggtcatgtatgtggtcagttgcctctgtttgctgctcaacctgtgtgagatggcccatctggggctggggtcagcacaagatgccgttaggggcagaagaggcccgcccgcgagtgcccccgcgccggcccctaggccgcccccatgtgcttttcctgcggctgccgctggtctcgcttgtccgcccgattactctctggtcgtcagagcggccgaaagagcaagagcacatgaccagaatctcgccaacctcgctttgcaggcacttcgggacggggcagccgccggggatcgcgatagggactcatctccctgcgtcggactccccgctgcttcacgagggcctccgagagcaggcgcaccggcgtctcggactggaagtgcgacatctgcgggcaccgtaggggaacaaggcagaccgggaacgcacgagagacctggggccaaacctcgcgctgggtccgaaaagggaagtgcatcatctcgggatggtaaaacaactgtgtggatagatccaccggtcgccaccatggtgagcaagggcgaggagctgttcaccggggtggtgcccatcctggtcgagctggacggcgacgtaaacggccacaagttcagcgtgtccggcgagggcgagggcgatgccacctacggcaagctgaccctgaagttcatctgcaccaccggcaagctgcccgtgccctggcccaccctcgtgaccaccttgacctacggcgtgcagtgcttcgcccgctaccccgaccacatgaagcagcacgacttcttcaagtccgccatgcccgaaggctacgtccaggagcgcaccatcttcttcaaggacgacggcaactacaagacccgcgccgaggtgaagttcgagggcgacaccctggtgaaccgcatcgagctgaagggcatcgacttcaaggaggacggcaacatcctggggcacaagctggagtacaactacaacagccacaaggtctatatcaccgccgacaagcagaagaacggcatcaaggtgaacttcaagacccgccacaacatcgaggacggcagcgtgcagctcgccgaccactaccagcagaacacccccatcggcgacggccccgtgctgctgcccgacaaccactacctgagcacccagtccaagctgagcaaagaccccaacgagaagcgcgatcacatggtcctgctggagttcgtgaccgccgccgggatcactctcggcatggacgagctgtacaagtaaagcggccgcgactctagatcataatcagccataccacatttgtagaggttttacttgctttaaaaaacctcccacacctccccctgaacctgaaacataaaatgaatgcaattgttgttgttaacttgtttattgcagcttataatggttacaaataaagcaatagcatcacaaatttcacaaataaagcatttttttcactgcattctagttgtggtttgtccaaactcatcaatgtatcttaaggcgtaaattgtaagcgttaatattttgttaaaattcgcgttaaatttttgttaaatcagctcattttttaaccaataggccgaaatcggcaaaatcccttataaatcaaaagaatagaccgagatagggttgagtgttgttccagtttggaacaagagtccactattaaagaacgtggactccaacgtcaaagggcgaaaaaccgtctatcagggcgatggcccactacgtgaaccatcaccctaatcaagttttttggggtcgaggtgccgtaaagcactaaatcggaaccctaaagggagcccccgatttagagcttgacggggaaagccggcgaacgtggcgagaaaggaagggaagaaagcgaaaggagcgggcgctagggcgctggcaagtgtagcggtcacgctgcgcgtaaccaccacacccgccgcgcttaatgcgccgctacagggcgcgtcaggtggcacttttcggggaaatgtgcgcggaacccctatttgtttatttttctaaatacattcaaatatgtatccgctcatgagacaataaccctgataaatgcttcaataatattgaaaaaggaagagtcctgaggcggaaagaaccagctgtggaatgtgtgtcagttagggtgtggaaagtccccaggctccccagcaggcagaagtatgcaaagcatgcatctcaattagtcagcaaccaggtgtggaaagtccccaggctccccagcaggcagaagtatgcaaagcatgcatctcaattagtcagcaaccatagtcccgcccctaactccgcccatcccgcccctaactccgcccagttccgcccattctccgccccatggctgactaattttttttatttatgcagaggccgaggccgcctcggcctctgagctattccagaagtagtgaggaggcttttttggaggcctaggcttttgcaaagatcgatcaagagacaggatgaggatcgtttcgcatgattgaacaagatggattgcacgcaggttctccggccgcttgggtggagaggctattcggctatgactgggcacaacagacaatcggctgctctgatgccgccgtgttccggctgtcagcgcaggggcgcccggttctttttgtcaagaccgacctgtccggtgccctgaatgaactgcaagacgaggcagcgcggctatcgtggctggccacgacgggcgttccttgcgcagctgtgctcgacgttgtcactgaagcgggaagggactggctgctattgggcgaagtgccggggcaggatctcctgtcatctcaccttgctcctgccgagaaagtatccatcatggctgatgcaatgcggcggctgcatacgcttgatccggctacctgcccattcgaccaccaagcgaaacatcgcatcgagcgagcacgtactcggatggaagccggtcttgtcgatcaggatgatctggacgaagagcatcaggggctcgcgccagccgaactgttcgccaggctcaaggcgagcatgcccgacggcgaggatctcgtcgtgacccatggcgatgcctgcttgccgaatatcatggtggaaaatggccgcttttctggattcatcgactgtggccggctgggtgtggcggaccgctatcaggacatagcgttggctacccgtgatattgctgaagagcttggcggcgaatgggctgaccgcttcctcgtgctttacggtatcgccgctcccgattcgcagcgcatcgccttctatcgccttcttgacgagttcttctgagcgggactctggggttcgaaatgaccgaccaagcgacgcccaacctgccatcacgagatttcgattccaccgccgccttctatgaaaggttgggcttcggaatcgttttccgggacgccggctggatgatcctccagcgcggggatctcatgctggagttcttcgcccaccctagggggaggctaactgaaacacggaaggagacaataccggaaggaacccgcgctatgacggcaataaaaagacagaataaaacgcacggtgttgggtcgtttgttcataaacgcggggttcggtcccagggctggcactctgtcgataccccaccgagaccccattggggccaatacgcccgcgtttcttccttttccccaccccaccccccaagttcgggtgaaggcccagggctcgcagccaacgtcggggcggcaggccctgccatagcctcaggttactcatatatactttagattgatttaaaacttcatttttaatttaaaaggatctaggtgaagatcctttttgataatctcatgaccaaaatcccttaacgtgagttttcgttccactgagcgtcagaccccgtagaaaagatcaaaggatcttcttgagatcctttttttctgcgcgtaatctgctgcttgcaaacaaaaaaaccaccgctaccagcggtggtttgtttgccggatcaagagctaccaactctttttccgaaggtaactggcttcagcagagcgcagataccaaatactgttcttctagtgtagccgtagttaggccaccacttcaagaactctgtagcaccgcctacatacctcgctctgctaatcctgttaccagtggctgctgccagtggcgataagtcgtgtcttaccgggttggactcaagacgatagttaccggataaggcgcagcggtcgggctgaacggggggttcgtgcacacagcccagcttggagcgaacgacctacaccgaactgagatacctacagcgtgagctatgagaaagcgccacgcttcccgaagggagaaaggcggacaggtatccggtaagcggcagggtcggaacaggagagcgcacgagggagcttccagggggaaacgcctggtatctttatagtcctgtcgggtttcgccacctctgacttgagcgtcgatttttgtgatgctcgtcaggggggcggagcctatggaaaaacgccagcaacgcggcctttttacggttcctggccttttgctggccttttgctcacatgttctttcctgcgttatcccctgattctgtggataaccgtattaccgccatgcattagttattaatagtaatcaattacggggtcattagttcatagcccatatatggagttccgcgttacataacttacggtaaatggcccgcctggctgaccgcccaacgacccccgcccattgacgtcaataatgacgtatgttcccatagtaacgccaatagggactttccattgacgtcaatgggtggagtatttacggtaaactgcccacttggcagtacatcaa

SEQ ID NO: 61 - DNA, 5993 bp, Artificial Sequence
  Synthetic
gtgtatcatatgccaagtacgccccctattgacgtcaatgacggtaaatggcccgcctggcattatgcccagtacatgaccttatgggactttcctacttggcagtacatctacgtattagtcatcgctattaccatggtgatgcggttttggcagtacatcaatgggcgtggatagcggtttgactcacggggatttccaagtctccaccccattgacgtcaatgggagtttgttttggcaccaaaatcaacgggactttccaaaatgtcgtaacaactccgccccattgacgcaaatgggcggtaggcgtgtacggtgggaggtctatataagcagagctggtttagtgaaccgtcagatccgctagcgctaccggactcagatctcgagctcatgggggattggtctttcctggggaacattctcgaagaagtgaatgagcatagcaccgtgataggtcgggtctggcttaccgtgcttttcatattcagaattttgatacttggaacagcagccgagtttgtatggggtgacgagcagagtgactttgtgtgcaacactcaacaaccggggtgtgagaatgtttgttacgatgaggcatttcccatctcacacatcagactgtgggtgcttcaaatcatattcgtcagcaccccaagccttatgtacgttggtcatgcggttcactacgtgagaatggaggagaaacgaaagtcaagggaggcagaggaactgggtcaacaggcaggcactaacggcggcccagatcaagggagtgttaagaaaagttccggttcaaaggggacaaagaaattccggctggaaggaactttgttgcgaacgtatatatgtcatatcatctttaaaacgctgttcgaggtgggatttatagtaggtcactacttcttgtacgggttccgcatactccctctgtacagatgttctaggtggccgtgtccgaatgttgtagattgcttcgtatcccgacccactgaaaaaaccatttttatcttgttcatgctcagcgtcgcttcagtaagcctctttctgaacgtgatggaattgggtcacctgggcctgaaaggaatcaggagtgctctgaaacggccagtggagcagcctctcggggagattccggagaagtctttgcatagtattgctgtatcttctattcagaaggccaaaggctatcagctcctcgaagaggaaaaaatagtgtctcattatttcccattgaccgaagtaggcatggtggagacaagccctctccccgccaagccattcaatcagtttgaggagaaaatatccactggtccgttgggtgacctctcccgaggttaccaagagacactcccgtcatacgcccaggttggggcacaagaggtcgagggagaagggccacctgccgaagagggtgctgaacctgaagtaggcgagaagaaagaggaagctgaacgactcaccactgaggaacaagagaaggtggcagtgcccgaaggcgagaaagtcgaaacgcctggagtagataaagagggggaaaaggaagagcctcaatccgaaaaggttagtaaacaaggattgcctgcagaaaagacgcccagtctttgcccagagctcacaacagatgacgcgcgaccgctctcaagactttccaaggcgtccagtcgagcgcgcagtgacgatctgaccgttgatccaccggtcgccaccatggtgagcaagggcgaggagctgttcaccggggtggtgcccatcctggtcgagctggacggcgacgtaaacggccacaagttcagcgtgtccggcgagggcgagggcgatgccacctacggcaagctgaccctgaagttcatctgcaccaccggcaagctgcccgtgccctggcccaccctcgtgaccaccttgacctacggcgtgcagtgcttcgcccgctaccccgaccacatgaagcagcacgacttcttcaagtccgccatgcccgaaggctacgtccaggagcgcaccatcttcttcaaggacgacggcaactacaagacccgcgccgaggtgaagttcgagggcgacaccctggtgaaccgcatcgagctgaagggcatcgacttcaaggaggacggcaacatcctggggcacaagctggagtacaactacaacagccacaaggtctatatcaccgccgacaagcagaagaacggcatcaaggtgaacttcaagacccgccacaacatcgaggacggcagcgtgcagctcgccgaccactaccagcagaacacccccatcggcgacggccccgtgctgctgcccgacaaccactacctgagcacccagtccaagctgagcaaagaccccaacgagaagcgcgatcacatggtcctgctggagttcgtgaccgccgccgggatcactctcggcatggacgagctgtacaagtaaagcggccgcgactctagatcataatcagccataccacatttgtagaggttttacttgctttaaaaaacctcccacacctccccctgaacctgaaacataaaatgaatgcaattgttgttgttaacttgtttattgcagcttataatggttacaaataaagcaatagcatcacaaatttcacaaataaagcatttttttcactgcattctagttgtggtttgtccaaactcatcaatgtatcttaaggcgtaaattgtaagcgttaatattttgttaaaattcgcgttaaatttttgttaaatcagctcattttttaaccaataggccgaaatcggcaaaatcccttataaatcaaaagaatagaccgagatagggttgagtgttgttccagtttggaacaagagtccactattaaagaacgtggactccaacgtcaaagggcgaaaaaccgtctatcagggcgatggcccactacgtgaaccatcaccctaatcaagttttttggggtcgaggtgccgtaaagcactaaatcggaaccctaaagggagcccccgatttagagcttgacggggaaagccggcgaacgtggcgagaaaggaagggaagaaagcgaaaggagcgggcgctagggcgctggcaagtgtagcggtcacgctgcgcgtaaccaccacacccgccgcgcttaatgcgccgctacagggcgcgtcaggtggcacttttcggggaaatgtgcgcggaacccctatttgtttatttttctaaatacattcaaatatgtatccgctcatgagacaataaccctgataaatgcttcaataatattgaaaaaggaagagtcctgaggcggaaagaaccagctgtggaatgtgtgtcagttagggtgtggaaagtccccaggctccccagcaggcagaagtatgcaaagcatgcatctcaattagtcagcaaccaggtgtggaaagtccccaggctccccagcaggcagaagtatgcaaagcatgcatctcaattagtcagcaaccatagtcccgcccctaactccgcccatcccgcccctaactccgcccagttccgcccattctccgccccatggctgactaattttttttatttatgcagaggccgaggccgcctcggcctctgagctattccagaagtagtgaggaggcttttttggaggcctaggcttttgcaaagatcgatcaagagacaggatgaggatcgtttcgcatgattgaacaagatggattgcacgcaggttctccggccgcttgggtggagaggctattcggctatgactgggcacaacagacaatcggctgctctgatgccgccgtgttccggctgtcagcgcaggggcgcccggttctttttgtcaagaccgacctgtccggtgccctgaatgaactgcaagacgaggcagcgcggctatcgtggctggccacgacgggcgttccttgcgcagctgtgctcgacgttgtcactgaagcgggaagggactggctgctattgggcgaagtgccggggcaggatctcctgtcatctcaccttgctcctgccgagaaagtatccatcatggctgatgcaatgcggcggctgcatacgcttgatccggctacctgcccattcgaccaccaagcgaaacatcgcatcgagcgagcacgtactcggatggaagccggtcttgtcgatcaggatgatctggacgaagagcatcaggggctcgcgccagccgaactgttcgccaggctcaaggcgagcatgcccgacggcgaggatctcgtcgtgacccatggcgatgcctgcttgccgaatatcatggtggaaaatggccgcttttctggattcatcgactgtggccggctgggtgtggcggaccgctatcaggacatagcgttggctacccgtgatattgctgaagagcttggcggcgaatgggctgaccgcttcctcgtgctttacggtatcgccgctcccgattcgcagcgcatcgccttctatcgccttcttgacgagttcttctgagcgggactctggggttcgaaatgaccgaccaagcgacgcccaacctgccatcacgagatttcgattccaccgccgccttctatgaaaggttgggcttcggaatcgttttccgggacgccggctggatgatcctccagcgcggggatctcatgctggagttcttcgcccaccctagggggaggctaactgaaacacggaaggagacaataccggaaggaacccgcgctatgacggcaataaaaagacagaataaaacgcacggtgttgggtcgtttgttcataaacgcggggttcggtcccagggctggcactctgtcgataccccaccgagaccccattggggccaatacgcccgcgtttcttccttttccccaccccaccccccaagttcgggtgaaggcccagggctcgcagccaacgtcggggcggcaggccctgccatagcctcaggttactcatatatactttagattgatttaaaacttcatttttaatttaaaaggatctaggtgaagatcctttttgataatctcatgaccaaaatcccttaacgtgagttttcgttccactgagcgtcagaccccgtagaaaagatcaaaggatcttcttgagatcctttttttctgcgcgtaatctgctgcttgcaaacaaaaaaaccaccgctaccagcggtggtttgtttgccggatcaagagctaccaactctttttccgaaggtaactggcttcagcagagcgcagataccaaatactgttcttctagtgtagccgtagttaggccaccacttcaagaactctgtagcaccgcctacatacctcgctctgctaatcctgttaccagtggctgctgccagtggcgataagtcgtgtcttaccgggttggactcaagacgatagttaccggataaggcgcagcggtcgggctgaacggggggttcgtgcacacagcccagcttggagcgaacgacctacaccgaactgagatacctacagcgtgagctatgagaaagcgccacgcttcccgaagggagaaaggcggacaggtatccggtaagcggcagggtcggaacaggagagcgcacgagggagcttccagggggaaacgcctggtatctttatagtcctgtcgggtttcgccacctctgacttgagcgtcgatttttgtgatgctcgtcaggggggcggagcctatggaaaaacgccagcaacgcggcctttttacggttcctggccttttgctggccttttgctcacatgttctttcctgcgttatcccctgattctgtggataaccgtattaccgccatgcattagttattaatagtaatcaattacggggtcattagttcatagcccatatatggagttccgcgttacataacttacggtaaatggcccgcctggctgaccgcccaacgacccccgcccattgacgtcaataatgacgtatgttcccatagtaacgccaatagggactttccattgacgtcaatgggtggagtatttacggtaaactgcccacttggcagtacatcaa

SEQ ID NO: 62 - DNA, 6238 bp, Artificial Sequence
  Synthetic
gtgtatcatatgccaagtacgccccctattgacgtcaatgacggtaaatggcccgcctggcattatgcccagtacatgaccttatgggactttcctacttggcagtacatctacgtattagtcatcgctattaccatggtgatgcggttttggcagtacatcaatgggcgtggatagcggtttgactcacggggatttccaagtctccaccccattgacgtcaatgggagtttgttttggcaccaaaatcaacgggactttccaaaatgtcgtaacaactccgccccattgacgcaaatgggcggtaggcgtgtacggtgggaggtctatataagcagagctggtttagtgaaccgtcagatccgctagcgctaccggactcagatctcgagctcatgggtgactggaatctccttggggacactctggaagaggttcatatacacagcacgatgatcggaaaaatctggctcacgatcctctttatttttcgaatgctggtacttggtgttgcggcagaggacgtatggaatgatgagcaatccgggtttatatgtaacaccgagcaacccggctgtcgcaacgtttgctatgatcaggcatttcccatttctcttattcgatactgggtactgcaagtaattttcgtgtcaagtccctcactggtctacatgggacacgcgctttatcggcttcgcgttttggaggaggaaaggcaaaggatgaaagcacaactgcgggttgagctcgaagaagtagaattcgagatgccccgagatcggcgccgattggagcaagagctgtgccagctggagaagagaaaactcaacaaagccccacttcgcgggactcttctgtgcacctacgtgattcatatcttcacccgctccgtagtggaggttgggttcatgatcgggcagtatctgctttatgggttccacctggaacccctgtttaagtgtcacggtcacccatgccccaacataatagactgctttgtatcacggcctactgagaagacgattttcctgctgttcatgcaatccattgcaaccatcagtctcttcttgaacatcctggagatctttcaccttggatttaagaaaattaaacggggtctctggggcaagtataaattgaagaaggaacacaacgagttccatgctaacaaagccaagcagaatgttgcaaagtaccaatccacgagtgcaaatagcctcaaacgcctccccagtgctccagactacaacttgttggtagagaagcaaacacatacagccgtttacccatcactgaactcctcctccgttttccagcccaatcctgacaaccacagtgtaaatgacgaaaagtgcatcttggacgagcaggaaacggtcctgagtaacgagataagcactctgtccacgtcttgcagccatttccaacacatttccagcaataacaacaaagacactcataaaatattcggcaaagagctgaacggtaaccagctcatggagaaacgggagacagagggtaaagactcaaagcggaactattattcaaggggtcatagatccatacctggcgtagcaatagacggggagaataacatgagacaaagcccgcagaccgtgtttagcctccccgccaattgcgactggaagccaagatggctccgagccacatggggcagttccacggagcacgaaaataggggaagtccaccgaagggtaatctcaaggggcagtttaggaaggggactgtgcgcactcttccgccttcacaaggagacagccaatcacttgacatccccaacaccgctgattctctcggcgggctgtcatttgagccaggtcttgttaggacctgtaacaacccagtatgccccccaaatcatgtagttagcttgacgaataaccttatcggccgcagagtccccactgatctgcaaatagatccaccggtcgccaccatggtgagcaagggcgaggagctgttcaccggggtggtgcccatcctggtcgagctggacggcgacgtaaacggccacaagttcagcgtgtccggcgagggcgagggcgatgccacctacggcaagctgaccctgaagttcatctgcaccaccggcaagctgcccgtgccctggcccaccctcgtgaccaccttgacctacggcgtgcagtgcttcgcccgctaccccgaccacatgaagcagcacgacttcttcaagtccgccatgcccgaaggctacgtccaggagcgcaccatcttcttcaaggacgacggcaactacaagacccgcgccgaggtgaagttcgagggcgacaccctggtgaaccgcatcgagctgaagggcatcgacttcaaggaggacggcaacatcctggggcacaagctggagtacaactacaacagccacaaggtctatatcaccgccgacaagcagaagaacggcatcaaggtgaacttcaagacccgccacaacatcgaggacggcagcgtgcagctcgccgaccactaccagcagaacacccccatcggcgacggccccgtgctgctgcccgacaaccactacctgagcacccagtccaagctgagcaaagaccccaacgagaagcgcgatcacatggtcctgctggagttcgtgaccgccgccgggatcactctcggcatggacgagctgtacaagtaagcggccgcgactctagatcataatcagccataccacatttgtagaggttttacttgctttaaaaaacctcccacacctccccctgaacctgaaacataaaatgaatgcaattgttgttgttaacttgtttattgcagcttataatggttacaaataaagcaatagcatcacaaatttcacaaataaagcatttttttcactgcattctagttgtggtttgtccaaactcatcaatgtatcttaaggcgtaaattgtaagcgttaatattttgttaaaattcgcgttaaatttttgttaaatcagctcattttttaaccaataggccgaaatcggcaaaatcccttataaatcaaaagaatagaccgagatagggttgagtgttgttccagtttggaacaagagtccactattaaagaacgtggactccaacgtcaaagggcgaaaaaccgtctatcagggcgatggcccactacgtgaaccatcaccctaatcaagttttttggggtcgaggtgccgtaaagcactaaatcggaaccctaaagggagcccccgatttagagcttgacggggaaagccggcgaacgtggcgagaaaggaagggaagaaagcgaaaggagcgggcgctagggcgctggcaagtgtagcggtcacgctgcgcgtaaccaccacacccgccgcgcttaatgcgccgctacagggcgcgtcaggtggcacttttcggggaaatgtgcgcggaacccctatttgtttatttttctaaatacattcaaatatgtatccgctcatgagacaataaccctgataaatgcttcaataatattgaaaaaggaagagtcctgaggcggaaagaaccagctgtggaatgtgtgtcagttagggtgtggaaagtccccaggctccccagcaggcagaagtatgcaaagcatgcatctcaattagtcagcaaccaggtgtggaaagtccccaggctccccagcaggcagaagtatgcaaagcatgcatctcaattagtcagcaaccatagtcccgcccctaactccgcccatcccgcccctaactccgcccagttccgcccattctccgccccatggctgactaattttttttatttatgcagaggccgaggccgcctcggcctctgagctattccagaagtagtgaggaggcttttttggaggcctaggcttttgcaaagatcgatcaagagacaggatgaggatcgtttcgcatgattgaacaagatggattgcacgcaggttctccggccgcttgggtggagaggctattcggctatgactgggcacaacagacaatcggctgctctgatgccgccgtgttccggctgtcagcgcaggggcgcccggttctttttgtcaagaccgacctgtccggtgccctgaatgaactgcaagacgaggcagcgcggctatcgtggctggccacgacgggcgttccttgcgcagctgtgctcgacgttgtcactgaagcgggaagggactggctgctattgggcgaagtgccggggcaggatctcctgtcatctcaccttgctcctgccgagaaagtatccatcatggctgatgcaatgcggcggctgcatacgcttgatccggctacctgcccattcgaccaccaagcgaaacatcgcatcgagcgagcacgtactcggatggaagccggtcttgtcgatcaggatgatctggacgaagagcatcaggggctcgcgccagccgaactgttcgccaggctcaaggcgagcatgcccgacggcgaggatctcgtcgtgacccatggcgatgcctgcttgccgaatatcatggtggaaaatggccgcttttctggattcatcgactgtggccggctgggtgtggcggaccgctatcaggacatagcgttggctacccgtgatattgctgaagagcttggcggcgaatgggctgaccgcttcctcgtgctttacggtatcgccgctcccgattcgcagcgcatcgccttctatcgccttcttgacgagttcttctgagcgggactctggggttcgaaatgaccgaccaagcgacgcccaacctgccatcacgagatttcgattccaccgccgccttctatgaaaggttgggcttcggaatcgttttccgggacgccggctggatgatcctccagcgcggggatctcatgctggagttcttcgcccaccctagggggaggctaactgaaacacggaaggagacaataccggaaggaacccgcgctatgacggcaataaaaagacagaataaaacgcacggtgttgggtcgtttgttcataaacgcggggttcggtcccagggctggcactctgtcgataccccaccgagaccccattggggccaatacgcccgcgtttcttccttttccccaccccaccccccaagttcgggtgaaggcccagggctcgcagccaacgtcggggcggcaggccctgccatagcctcaggttactcatatatactttagattgatttaaaacttcatttttaatttaaaaggatctaggtgaagatcctttttgataatctcatgaccaaaatcccttaacgtgagttttcgttccactgagcgtcagaccccgtagaaaagatcaaaggatcttcttgagatcctttttttctgcgcgtaatctgctgcttgcaaacaaaaaaaccaccgctaccagcggtggtttgtttgccggatcaagagctaccaactctttttccgaaggtaactggcttcagcagagcgcagataccaaatactgttcttctagtgtagccgtagttaggccaccacttcaagaactctgtagcaccgcctacatacctcgctctgctaatcctgttaccagtggctgctgccagtggcgataagtcgtgtcttaccgggttggactcaagacgatagttaccggataaggcgcagcggtcgggctgaacggggggttcgtgcacacagcccagcttggagcgaacgacctacaccgaactgagatacctacagcgtgagctatgagaaagcgccacgcttcccgaagggagaaaggcggacaggtatccggtaagcggcagggtcggaacaggagagcgcacgagggagcttccagggggaaacgcctggtatctttatagtcctgtcgggtttcgccacctctgacttgagcgtcgatttttgtgatgctcgtcaggggggcggagcctatggaaaaacgccagcaacgcggcctttttacggttcctggccttttgctggccttttgctcacatgttctttcctgcgttatcccctgattctgtggataaccgtattaccgccatgcattagttattaatagtaatcaattacggggtcattagttcatagcccatatatggagttccgcgttacataacttacggtaaatggcccgcctggctgaccgcccaacgacccccgcccattgacgtcaataatgacgtatgttcccatagtaacgccaatagggactttccattgacgtcaatgggtggagtatttacggtaaactgcccacttggcagtacatcaa

SEQ ID NO: 63 - DNA, 6323 bp, Artificial Sequence
  Synthetic
gtgtatcatatgccaagtacgccccctattgacgtcaatgacggtaaatggcccgcctggcattatgcccagtacatgaccttatgggactttcctacttggcagtacatctacgtattagtcatcgctattaccatggtgatgcggttttggcagtacatcaatgggcgtggatagcggtttgactcacggggatttccaagtctccaccccattgacgtcaatgggagtttgttttggcaccaaaatcaacgggactttccaaaatgtcgtaacaactccgccccattgacgcaaatgggcggtaggcgtgtacggtgggaggtctatataagcagagctggtttagtgaaccgtcagatccgctagcgctaccggactcagatctcgagctcatgggagactggaatcttcttggaggcatactggaggaagttcactcacattctacgattgtaggaaaaatttggctcaccattctcttcatctttcggatgctggtactgagggtggctgccgaggacgtttgggacgatgaacaaagtgcctttgcctgtaacacccggcaacctggatgtaacaatatctgttacgatgacgcattccctatttccttgatccggttctgggtcctgcaaatcatatttgtatcctccccatcccttgtctacatggggcacgcgttgtaccgattgcgcgcgttcgaaaaggatcggcaacggaaaaagagccacctccgagcgcagatggagaaccccgacttggatcttgaggaacaacagaggatagatcgggaactccgccgcctcgaggagcaaaaaagaattcataaggtgcctttgaaagggtgcctgctcaggacttacgttcttcacatccttactaggagtgtcttggaggtgggattcatgatcggtcaatatatcctgtatggattccagatgcacccattgtataagtgcacgcaacccccttgtcccaacgccgtagattgctttgtttcccggccaactgagaagacgatatttatgcttttcatgcactcaatcgcagccatatctcttctccttaatattctcgaaattttccacttgggaattcggaaaattatgagaactctctacaaaaagtcttccagcgaaggcattgaagacgagacgggcccaccgtttcatctgaaaaaatactccgtcgctcagcaatgtatgatctgctcttctctccctgagagaatctcacctttgcaagctaataatcagcaacaggtaatccgagtgaatgtaccgaagtccaaaaccatgtggcaaataccccagccgcgacagcttgaggttgacccgtcaaacggtaaaaaagattggagtgagaaggaccagcactcagggcagctgcacgtccatagcccctgtccgtgggccggttccgccgggaatcagcacctgggccaacagagcgaccacagcagttttgggcttcaaaacacaatgagccaatcctggctcggtactacaacggcgccgcgaaattgtccatcttttgcggtcggaacctgggaacaaagccaagaccccgagcccagcggcgaacccctgacggaccttcattcccattgcagagactctgagggaagcatgagggaaagcggggtatggattgatcgctcccgcccaggaagccgaaaagcatcctttttgagtaggcttcttagcgaaaaaaggcatctgcattctgacagtggtagcagtggatcaagaaacagctcatgtctcgatttcccccactgggaaaattcaccttccccgctgccttcagtaacaggacaccggacaagcatggtcaggcaagcggctttgccaatcatggaactgtctcaggaattgtttcactccggttgttttttgtttcccttctttcttccgggcgtgtgcatgtacgtgtgtgtagaccgggaggctgacggcgggggagattatctgtggcgcgacaaaatcattcactcaatacactcagtcaaatttaatagcgatccaccggtcgccaccatggtgagcaagggcgaggagctgttcaccggggtggtgcccatcctggtcgagctggacggcgacgtaaacggccacaagttcagcgtgtccggcgagggcgagggcgatgccacctacggcaagctgaccctgaagttcatctgcaccaccggcaagctgcccgtgccctggcccaccctcgtgaccaccttgacctacggcgtgcagtgcttcgcccgctaccccgaccacatgaagcagcacgacttcttcaagtccgccatgcccgaaggctacgtccaggagcgcaccatcttcttcaaggacgacggcaactacaagacccgcgccgaggtgaagttcgagggcgacaccctggtgaaccgcatcgagctgaagggcatcgacttcaaggaggacggcaacatcctggggcacaagctggagtacaactacaacagccacaaggtctatatcaccgccgacaagcagaagaacggcatcaaggtgaacttcaagacccgccacaacatcgaggacggcagcgtgcagctcgccgaccactaccagcagaacacccccatcggcgacggccccgtgctgctgcccgacaaccactacctgagcacccagtccaagctgagcaaagaccccaacgagaagcgcgatcacatggtcctgctggagttcgtgaccgccgccgggatcactctcggcatggacgagctgtacaagtaaagcggccgcgactctagatcataatcagccataccacatttgtagaggttttacttgctttaaaaaacctcccacacctccccctgaacctgaaacataaaatgaatgcaattgttgttgttaacttgtttattgcagcttataatggttacaaataaagcaatagcatcacaaatttcacaaataaagcatttttttcactgcattctagttgtggtttgtccaaactcatcaatgtatcttaaggcgtaaattgtaagcgttaatattttgttaaaattcgcgttaaatttttgttaaatcagctcattttttaaccaataggccgaaatcggcaaaatcccttataaatcaaaagaatagaccgagatagggttgagtgttgttccagtttggaacaagagtccactattaaagaacgtggactccaacgtcaaagggcgaaaaaccgtctatcagggcgatggcccactacgtgaaccatcaccctaatcaagttttttggggtcgaggtgccgtaaagcactaaatcggaaccctaaagggagcccccgatttagagcttgacggggaaagccggcgaacgtggcgagaaaggaagggaagaaagcgaaaggagcgggcgctagggcgctggcaagtgtagcggtcacgctgcgcgtaaccaccacacccgccgcgcttaatgcgccgctacagggcgcgtcaggtggcacttttcggggaaatgtgcgcggaacccctatttgtttatttttctaaatacattcaaatatgtatccgctcatgagacaataaccctgataaatgcttcaataatattgaaaaaggaagagtcctgaggcggaaagaaccagctgtggaatgtgtgtcagttagggtgtggaaagtccccaggctccccagcaggcagaagtatgcaaagcatgcatctcaattagtcagcaaccaggtgtggaaagtccccaggctccccagcaggcagaagtatgcaaagcatgcatctcaattagtcagcaaccatagtcccgcccctaactccgcccatcccgcccctaactccgcccagttccgcccattctccgccccatggctgactaattttttttatttatgcagaggccgaggccgcctcggcctctgagctattccagaagtagtgaggaggcttttttggaggcctaggcttttgcaaagatcgatcaagagacaggatgaggatcgtttcgcatgattgaacaagatggattgcacgcaggttctccggccgcttgggtggagaggctattcggctatgactgggcacaacagacaatcggctgctctgatgccgccgtgttccggctgtcagcgcaggggcgcccggttctttttgtcaagaccgacctgtccggtgccctgaatgaactgcaagacgaggcagcgcggctatcgtggctggccacgacgggcgttccttgcgcagctgtgctcgacgttgtcactgaagcgggaagggactggctgctattgggcgaagtgccggggcaggatctcctgtcatctcaccttgctcctgccgagaaagtatccatcatggctgatgcaatgcggcggctgcatacgcttgatccggctacctgcccattcgaccaccaagcgaaacatcgcatcgagcgagcacgtactcggatggaagccggtcttgtcgatcaggatgatctggacgaagagcatcaggggctcgcgccagccgaactgttcgccaggctcaaggcgagcatgcccgacggcgaggatctcgtcgtgacccatggcgatgcctgcttgccgaatatcatggtggaaaatggccgcttttctggattcatcgactgtggccggctgggtgtggcggaccgctatcaggacatagcgttggctacccgtgatattgctgaagagcttggcggcgaatgggctgaccgcttcctcgtgctttacggtatcgccgctcccgattcgcagcgcatcgccttctatcgccttcttgacgagttcttctgagcgggactctggggttcgaaatgaccgaccaagcgacgcccaacctgccatcacgagatttcgattccaccgccgccttctatgaaaggttgggcttcggaatcgttttccgggacgccggctggatgatcctccagcgcggggatctcatgctggagttcttcgcccaccctagggggaggctaactgaaacacggaaggagacaataccggaaggaacccgcgctatgacggcaataaaaagacagaataaaacgcacggtgttgggtcgtttgttcataaacgcggggttcggtcccagggctggcactctgtcgataccccaccgagaccccattggggccaatacgcccgcgtttcttccttttccccaccccaccccccaagttcgggtgaaggcccagggctcgcagccaacgtcggggcggcaggccctgccatagcctcaggttactcatatatactttagattgatttaaaacttcatttttaatttaaaaggatctaggtgaagatcctttttgataatctcatgaccaaaatcccttaacgtgagttttcgttccactgagcgtcagaccccgtagaaaagatcaaaggatcttcttgagatcctttttttctgcgcgtaatctgctgcttgcaaacaaaaaaaccaccgctaccagcggtggtttgtttgccggatcaagagctaccaactctttttccgaaggtaactggcttcagcagagcgcagataccaaatactgttcttctagtgtagccgtagttaggccaccacttcaagaactctgtagcaccgcctacatacctcgctctgctaatcctgttaccagtggctgctgccagtggcgataagtcgtgtcttaccgggttggactcaagacgatagttaccggataaggcgcagcggtcgggctgaacggggggttcgtgcacacagcccagcttggagcgaacgacctacaccgaactgagatacctacagcgtgagctatgagaaagcgccacgcttcccgaagggagaaaggcggacaggtatccggtaagcggcagggtcggaacaggagagcgcacgagggagcttccagggggaaacgcctggtatctttatagtcctgtcgggtttcgccacctctgacttgagcgtcgatttttgtgatgctcgtcaggggggcggagcctatggaaaaacgccagcaacgcggcctttttacggttcctggccttttgctggccttttgctcacatgttctttcctgcgttatcccctgattctgtggataaccgtattaccgccatgcattagttattaatagtaatcaattacggggtcattagttcatagcccatatatggagttccgcgttacataacttacggtaaatggcccgcctggctgaccgcccaacgacccccgcccattgacgtcaataatgacgtatgttcccatagtaacgccaatagggactttccattgacgtcaatgggtggagtatttacggtaaactgcccacttggcagtacatcaa

SEQ ID NO: 64 - DNA, 5836 bp, Artificial Sequence
  Synthetic
catgcattagttattaatagtaatcaattacggggtcattagttcatagcccatatatggagttccgcgttacataacttacggtaaatggcccgcctggctgaccgcccaacgacccccgcccattgacgtcaataatgacgtatgttcccatagtaacgccaatagggactttccattgacgtcaatgggtggagtatttacggtaaactgcccacttggcagtacatcaagtgtatcatatgccaagtacgccccctattgacgtcaatgacggtaaatggcccgcctggcattatgcccagtacatgaccttatgggactttcctacttggcagtacatctacgtattagtcatcgctattaccatggtgatgcggttttggcagtacatcaatgggcgtggatagcggtttgactcacggggatttccaagtctccaccccattgacgtcaatgggagtttgttttggcaccaaaatcaacgggactttccaaaatgtcgtaacaactccgccccattgacgcaaatgggcggtaggcgtgtacggtgggaggtctatataagcagagctggtttagtgaaccgtcagatccgctagcgctaccggactcagatctcgagatgggggattggtcagctcttggaaagctccttgacaaagtacaggcgtacagtactgccggaggaaaagtgtggctcagtgtactgtttatattccggattctgcttctcggcacagccgtggagagcgtatggggagatgagcaggcagactttgtatgtaacacattgcagccaggatgtaagaatgtatgctacgaccactacttccctatctcccacgtaaggttctgggtgttgcagataatcttcgtttctgtacccacccttctttatcttgcccatgtgttttacgtaatgagaaaggaggagaaacttaataagaaagaggaggaattgaaagtcgcgcaaacggatggcgttaatgtggatatgcatctgaagcaaatagagataaagaaattcaaatatggtattgaagaacatggaaaagtaaaaatgagaggtggtttgcttcggacgtatattatctccatactttttaaaagcatatttgaggtagccttcttgctgatacagtggtatatatacggctttagcatgcaacgactcgttaagtgtaatgcctggccgtgccccaatacagtggactgcttcgttagcagaccgacagaaaaaactatcttcatcatttttatgctggtggtatccctggtttccctggcactcaacataatagaactcttctatgtgttcttcaagggggttaaggacagggtgaaaggtaagtccgacccatatcatgcgacctctggagcgctgtcccctgcaaaggactgtggaagccagaagtacgcctattttaatggatgttccagtcctacagcccctctgagccctatgtctccacccggatataaactggtgaccggtgatcgcaacaattcaagttgcaggaactataataagcaggcttccgaacagaattgggccaattacagtgccgaacaaaaccgaatgggacaagcgggatctaccatttctaattcacacgctcaaccgtttgacttccctgatgacaatcagaacagtaaaaagctcgcggctggccacgaactgcaaccgcttgcgatagtagaccaaagaccgagcagtcgagcgtcttccagagcaagctctcgcccacggccagacgatctggaaatagatccaccggtcgccaccatggtgagcaagggcgaggagctgttcaccggggtggtgcccatcctggtcgagctggacggcgacgtaaacggccacaagttcagcgtgtccggcgagggcgagggcgatgccacctacggcaagctgaccctgaagttcatctgcaccaccggcaagctgcccgtgccctggcccaccctcgtgaccaccttgacctacggcgtgcagtgcttcgcccgctaccccgaccacatgaagcagcacgacttcttcaagtccgccatgcccgaaggctacgtccaggagcgcaccatcttcttcaaggacgacggcaactacaagacccgcgccgaggtgaagttcgagggcgacaccctggtgaaccgcatcgagctgaagggcatcgacttcaaggaggacggcaacatcctggggcacaagctggagtacaactacaacagccacaaggtctatatcaccgccgacaagcagaagaacggcatcaaggtgaacttcaagacccgccacaacatcgaggacggcagcgtgcagctcgccgaccactaccagcagaacacccccatcggcgacggccccgtgctgctgcccgacaaccactacctgagcacccagtccaagctgagcaaagaccccaacgagaagcgcgatcacatggtcctgctggagttcgtgaccgccgccgggatcactctcggcatggacgagctgtacaagtaagcggccgcgactctagatcataatcagccataccacatttgtagaggttttacttgctttaaaaaacctcccacacctccccctgaacctgaaacataaaatgaatgcaattgttgttgttaacttgtttattgcagcttataatggttacaaataaagcaatagcatcacaaatttcacaaataaagcatttttttcactgcattctagttgtggtttgtccaaactcatcaatgtatcttaaggcgtaaattgtaagcgttaatattttgttaaaattcgcgttaaatttttgttaaatcagctcattttttaaccaataggccgaaatcggcaaaatcccttataaatcaaaagaatagaccgagatagggttgagtgttgttccagtttggaacaagagtccactattaaagaacgtggactccaacgtcaaagggcgaaaaaccgtctatcagggcgatggcccactacgtgaaccatcaccctaatcaagttttttggggtcgaggtgccgtaaagcactaaatcggaaccctaaagggagcccccgatttagagcttgacggggaaagccggcgaacgtggcgagaaaggaagggaagaaagcgaaaggagcgggcgctagggcgctggcaagtgtagcggtcacgctgcgcgtaaccaccacacccgccgcgcttaatgcgccgctacagggcgcgtcaggtggcacttttcggggaaatgtgcgcggaacccctatttgtttatttttctaaatacattcaaatatgtatccgctcatgagacaataaccctgataaatgcttcaataatattgaaaaaggaagagtcctgaggcggaaagaaccagctgtggaatgtgtgtcagttagggtgtggaaagtccccaggctccccagcaggcagaagtatgcaaagcatgcatctcaattagtcagcaaccaggtgtggaaagtccccaggctccccagcaggcagaagtatgcaaagcatgcatctcaattagtcagcaaccatagtcccgcccctaactccgcccatcccgcccctaactccgcccagttccgcccattctccgccccatggctgactaattttttttatttatgcagaggccgaggccgcctcggcctctgagctattccagaagtagtgaggaggcttttttggaggcctaggcttttgcaaagatcgatcaagagacaggatgaggatcgtttcgcatgattgaacaagatggattgcacgcaggttctccggccgcttgggtggagaggctattcggctatgactgggcacaacagacaatcggctgctctgatgccgccgtgttccggctgtcagcgcaggggcgcccggttctttttgtcaagaccgacctgtccggtgccctgaatgaactgcaagacgaggcagcgcggctatcgtggctggccacgacgggcgttccttgcgcagctgtgctcgacgttgtcactgaagcgggaagggactggctgctattgggcgaagtgccggggcaggatctcctgtcatctcaccttgctcctgccgagaaagtatccatcatggctgatgcaatgcggcggctgcatacgcttgatccggctacctgcccattcgaccaccaagcgaaacatcgcatcgagcgagcacgtactcggatggaagccggtcttgtcgatcaggatgatctggacgaagagcatcaggggctcgcgccagccgaactgttcgccaggctcaaggcgagcatgcccgacggcgaggatctcgtcgtgacccatggcgatgcctgcttgccgaatatcatggtggaaaatggccgcttttctggattcatcgactgtggccggctgggtgtggcggaccgctatcaggacatagcgttggctacccgtgatattgctgaagagcttggcggcgaatgggctgaccgcttcctcgtgctttacggtatcgccgctcccgattcgcagcgcatcgccttctatcgccttcttgacgagttcttctgagcgggactctggggttcgaaatgaccgaccaagcgacgcccaacctgccatcacgagatttcgattccaccgccgccttctatgaaaggttgggcttcggaatcgttttccgggacgccggctggatgatcctccagcgcggggatctcatgctggagttcttcgcccaccctagggggaggctaactgaaacacggaaggagacaataccggaaggaacccgcgctatgacggcaataaaaagacagaataaaacgcacggtgttgggtcgtttgttcataaacgcggggttcggtcccagggctggcactctgtcgataccccaccgagaccccattggggccaatacgcccgcgtttcttccttttccccaccccaccccccaagttcgggtgaaggcccagggctcgcagccaacgtcggggcggcaggccctgccatagcctcaggttactcatatatactttagattgatttaaaacttcatttttaatttaaaaggatctaggtgaagatcctttttgataatctcatgaccaaaatcccttaacgtgagttttcgttccactgagcgtcagaccccgtagaaaagatcaaaggatcttcttgagatcctttttttctgcgcgtaatctgctgcttgcaaacaaaaaaaccaccgctaccagcggtggtttgtttgccggatcaagagctaccaactctttttccgaaggtaactggcttcagcagagcgcagataccaaatactgttcttctagtgtagccgtagttaggccaccacttcaagaactctgtagcaccgcctacatacctcgctctgctaatcctgttaccagtggctgctgccagtggcgataagtcgtgtcttaccgggttggactcaagacgatagttaccggataaggcgcagcggtcgggctgaacggggggttcgtgcacacagcccagcttggagcgaacgacctacaccgaactgagatacctacagcgtgagctatgagaaagcgccacgcttcccgaagggagaaaggcggacaggtatccggtaagcggcagggtcggaacaggagagcgcacgagggagcttccagggggaaacgcctggtatctttatagtcctgtcgggtttcgccacctctgacttgagcgtcgatttttgtgatgctcgtcaggggggcggagcctatggaaaaacgccagcaacgcggcctttttacggttcctggccttttgctggccttttgctcacatgttctttcctgcgttatcccctgattctgtggataaccgtattaccgc

SEQ ID NO: 65 - DNA, 5539 bp, Artificial Sequence
  Synthetic
gtgtatcatatgccaagtacgccccctattgacgtcaatgacggtaaatggcccgcctggcattatgcccagtacatgaccttatgggactttcctacttggcagtacatctacgtattagtcatcgctattaccatggtgatgcggttttggcagtacatcaatgggcgtggatagcggtttgactcacggggatttccaagtctccaccccattgacgtcaatgggagtttgttttggcaccaaaatcaacgggactttccaaaatgtcgtaacaactccgccccattgacgcaaatgggcggtaggcgtgtacggtgggaggtctatataagcagagctggtttagtgaaccgtcagatccgctagcgctaccggactcagatctcgagctcatgagcttgaactatattaagaacttctacgagggatgcgtcaaacctcctacggtcataggccaattccacaccctcttcttcgggtccattcgcattttcttcttgggagtcctgggtttcgccgtttacgggaacgaagctcttcattttatttgcgaccccgataaacgggaggttaatcttttttgttataatcaattcagaccgataacgccacaagttagcttttccgctctgcaacttgtgatagtccttgtgcctggcgctcttttccacctctatgccgcttgtaaaagcatcaaccaggaatgtatccttcaaaagccgatctataccatcatatacatattgtctgttctcttgaggataagtcttgcagctattgctttttggttgcagatatatttgttcggtttccaggtgaaaagcctgtacctttgcgacgcgcggtcactgggtgaaaatatgataataagatgcatggtcccggagcattttgaaaagacaatttttttgatcgcaatcaataccttcactacgattacgatactgcttttcgtagcagagatttttgagataatattccgaagactttactttccctttagacagggaggttcaggcggtgatccaccggtcgccaccatggcgcgtaaggtcgatctcacctcctgcgatcgcgagccgatccacatccccggcagcattcagccgtgcggctgcctgctagcctgcgacgcgcaggcggtgcggatcacgcgcattacggaaaatgccggcgcgttctttggacgcgaaactccgcgggtcggtgagctactcgccgattacttcggcgagaccgaagcccatgcgctgcgcaacgcactggcgcagtcctccgatccaaagcgaccggcgctgatcttcggttggcgcgacggcctgaccggccgcaccttcgacatctcactgcatcgccatgacggtacatcgatcatcgagttcgagcctgcggcggccgaacaggccgacaatccgctgcggctgacgcggcagatcatcgcgcgcaccaaagaactgaagtcgctcgaagagatggccgcacgggtgccgcgctatctgcaggcgatgctcggctatcaccgcgtgatgttgtaccgcttcgcggacgacggctccgggatggtgatcggcgaggcgaagcgcagcgacctcgagagctttctcggtcagcactttccggcgtcgctggtcccgcagcaggcgcggctactgtacttgaagaacgcgatccgcgtggtctcggattcgcgcggcatcagcagccggatcgtgcccgagcacgacgcctccggcgccgcgctcgatctgtcgttcgcgcacctgcgcagcatctcgccctgccatctcgaatttctgcggaacatgggcgtcagcgcctcgatgtcgctgtcgatcatcattgacggcacgctatggggattgatcatctgtcatcattacgagccgcgtgccgtgccgatggcgcagcgcgtcgcggccgaaatgttcgccgacttcttatcgctgcacttcaccgccgcccaccaccaacgctaagcggccgcgactctagatcataatcagccataccacatttgtagaggttttacttgctttaaaaaacctcccacacctccccctgaacctgaaacataaaatgaatgcaattgttgttgttaacttgtttattgcagcttataatggttacaaataaagcaatagcatcacaaatttcacaaataaagcatttttttcactgcattctagttgtggtttgtccaaactcatcaatgtatcttaaggcgtaaattgtaagcgttaatattttgttaaaattcgcgttaaatttttgttaaatcagctcattttttaaccaataggccgaaatcggcaaaatcccttataaatcaaaagaatagaccgagatagggttgagtgttgttccagtttggaacaagagtccactattaaagaacgtggactccaacgtcaaagggcgaaaaaccgtctatcagggcgatggcccactacgtgaaccatcaccctaatcaagttttttggggtcgaggtgccgtaaagcactaaatcggaaccctaaagggagcccccgatttagagcttgacggggaaagccggcgaacgtggcgagaaaggaagggaagaaagcgaaaggagcgggcgctagggcgctggcaagtgtagcggtcacgctgcgcgtaaccaccacacccgccgcgcttaatgcgccgctacagggcgcgtcaggtggcacttttcggggaaatgtgcgcggaacccctatttgtttatttttctaaatacattcaaatatgtatccgctcatgagacaataaccctgataaatgcttcaataatattgaaaaaggaagagtcctgaggcggaaagaaccagctgtggaatgtgtgtcagttagggtgtggaaagtccccaggctccccagcaggcagaagtatgcaaagcatgcatctcaattagtcagcaaccaggtgtggaaagtccccaggctccccagcaggcagaagtatgcaaagcatgcatctcaattagtcagcaaccatagtcccgcccctaactccgcccatcccgcccctaactccgcccagttccgcccattctccgccccatggctgactaattttttttatttatgcagaggccgaggccgcctcggcctctgagctattccagaagtagtgaggaggcttttttggaggcctaggcttttgcaaagatcgatcaagagacaggatgaggatcgtttcgcatgattgaacaagatggattgcacgcaggttctccggccgcttgggtggagaggctattcggctatgactgggcacaacagacaatcggctgctctgatgccgccgtgttccggctgtcagcgcaggggcgcccggttctttttgtcaagaccgacctgtccggtgccctgaatgaactgcaagacgaggcagcgcggctatcgtggctggccacgacgggcgttccttgcgcagctgtgctcgacgttgtcactgaagcgggaagggactggctgctattgggcgaagtgccggggcaggatctcctgtcatctcaccttgctcctgccgagaaagtatccatcatggctgatgcaatgcggcggctgcatacgcttgatccggctacctgcccattcgaccaccaagcgaaacatcgcatcgagcgagcacgtactcggatggaagccggtcttgtcgatcaggatgatctggacgaagagcatcaggggctcgcgccagccgaactgttcgccaggctcaaggcgagcatgcccgacggcgaggatctcgtcgtgacccatggcgatgcctgcttgccgaatatcatggtggaaaatggccgcttttctggattcatcgactgtggccggctgggtgtggcggaccgctatcaggacatagcgttggctacccgtgatattgctgaagagcttggcggcgaatgggctgaccgcttcctcgtgctttacggtatcgccgctcccgattcgcagcgcatcgccttctatcgccttcttgacgagttcttctgagcgggactctggggttcgaaatgaccgaccaagcgacgcccaacctgccatcacgagatttcgattccaccgccgccttctatgaaaggttgggcttcggaatcgttttccgggacgccggctggatgatcctccagcgcggggatctcatgctggagttcttcgcccaccctagggggaggctaactgaaacacggaaggagacaataccggaaggaacccgcgctatgacggcaataaaaagacagaataaaacgcacggtgttgggtcgtttgttcataaacgcggggttcggtcccagggctggcactctgtcgataccccaccgagaccccattggggccaatacgcccgcgtttcttccttttccccaccccaccccccaagttcgggtgaaggcccagggctcgcagccaacgtcggggcggcaggccctgccatagcctcaggttactcatatatactttagattgatttaaaacttcatttttaatttaaaaggatctaggtgaagatcctttttgataatctcatgaccaaaatcccttaacgtgagttttcgttccactgagcgtcagaccccgtagaaaagatcaaaggatcttcttgagatcctttttttctgcgcgtaatctgctgcttgcaaacaaaaaaaccaccgctaccagcggtggtttgtttgccggatcaagagctaccaactctttttccgaaggtaactggcttcagcagagcgcagataccaaatactgttcttctagtgtagccgtagttaggccaccacttcaagaactctgtagcaccgcctacatacctcgctctgctaatcctgttaccagtggctgctgccagtggcgataagtcgtgtcttaccgggttggactcaagacgatagttaccggataaggcgcagcggtcgggctgaacggggggttcgtgcacacagcccagcttggagcgaacgacctacaccgaactgagatacctacagcgtgagctatgagaaagcgccacgcttcccgaagggagaaaggcggacaggtatccggtaagcggcagggtcggaacaggagagcgcacgagggagcttccagggggaaacgcctggtatctttatagtcctgtcgggtttcgccacctctgacttgagcgtcgatttttgtgatgctcgtcaggggggcggagcctatggaaaaacgccagcaacgcggcctttttacggttcctggccttttgctggccttttgctcacatgttctttcctgcgttatcccctgattctgtggataaccgtattaccgccatgcattagttattaatagtaatcaattacggggtcattagttcatagcccatatatggagttccgcgttacataacttacggtaaatggcccgcctggctgaccgcccaacgacccccgcccattgacgtcaataatgacgtatgttcccatagtaacgccaatagggactttccattgacgtcaatgggtggagtatttacggtaaactgcccacttggcagtacatcaa

SEQ ID NO: 66 - DNA, 5593 bp, Artificial Sequence
  Synthetic
gtgtatcatatgccaagtacgccccctattgacgtcaatgacggtaaatggcccgcctggcattatgcccagtacatgaccttatgggactttcctacttggcagtacatctacgtattagtcatcgctattaccatggtgatgcggttttggcagtacatcaatgggcgtggatagcggtttgactcacggggatttccaagtctccaccccattgacgtcaatgggagtttgttttggcaccaaaatcaacgggactttccaaaatgtcgtaacaactccgccccattgacgcaaatgggcggtaggcgtgtacggtgggaggtctatataagcagagctggtttagtgaaccgtcagatccgctagcgctaccggactcagatctcgagctcatgtcatggatgtttctgagggacctcctgtcaggtgttaataagtattcaaccggtacgggttggatctggctcgctgtagtcttcgtgtttaggctcctggtctatatggtcgcggcggagcatgtatggaaagatgaacagaaggagtttgaatgtaacagtcggcagcctggctgtaagaacgtgtgcttcgatgattttttccctatttcccaggtacggctttgggctctgcaactcattatggtgtccacgcctagcctgcttgtcgttctgcacgtcgcttatcatgaaggaagagagaaacggcatcggaagaaattgtatgtcagccccggaacaatggatggcggcttgtggtacgcttacctgataagcctgattgtgaagacaggttttgaaatagggtttttggttctcttttacaagctctacgacggtttttctgttccatatcttatcaaatgcgacttgaaaccatgccctaatactgtggactgctttatttccaagcctacagagaaaaccatcttcatattgttcctcgtaattacgagttgtttgtgcatagtcctgaatttcatcgagttgtcattcctggtactgaagtgcttcatcaagtgttgtttgcagaagtatctgaagaagcctcaggtactgtctgtaggaggttcaggcggtgatccaccggtcgccaccatggcgcgtaaggtcgatctcacctcctgcgatcgcgagccgatccacatccccggcagcattcagccgtgcggctgcctgctagcctgcgacgcgcaggcggtgcggatcacgcgcattacggaaaatgccggcgcgttctttggacgcgaaactccgcgggtcggtgagctactcgccgattacttcggcgagaccgaagcccatgcgctgcgcaacgcactggcgcagtcctccgatccaaagcgaccggcgctgatcttcggttggcgcgacggcctgaccggccgcaccttcgacatctcactgcatcgccatgacggtacatcgatcatcgagttcgagcctgcggcggccgaacaggccgacaatccgctgcggctgacgcggcagatcatcgcgcgcaccaaagaactgaagtcgctcgaagagatggccgcacgggtgccgcgctatctgcaggcgatgctcggctatcaccgcgtgatgttgtaccgcttcgcggacgacggctccgggatggtgatcggcgaggcgaagcgcagcgacctcgagagctttctcggtcagcactttccggcgtcgctggtcccgcagcaggcgcggctactgtacttgaagaacgcgatccgcgtggtctcggattcgcgcggcatcagcagccggatcgtgcccgagcacgacgcctccggcgccgcgctcgatctgtcgttcgcgcacctgcgcagcatctcgccctgccatctcgaatttctgcggaacatgggcgtcagcgcctcgatgtcgctgtcgatcatcattgacggcacgctatggggattgatcatctgtcatcattacgagccgcgtgccgtgccgatggcgcagcgcgtcgcggccgaaatgttcgccgacttcttatcgctgcacttcaccgccgcccaccaccaacgctaagcggccgcgactctagatcataatcagccataccacatttgtagaggttttacttgctttaaaaaacctcccacacctccccctgaacctgaaacataaaatgaatgcaattgttgttgttaacttgtttattgcagcttataatggttacaaataaagcaatagcatcacaaatttcacaaataaagcatttttttcactgcattctagttgtggtttgtccaaactcatcaatgtatcttaaggcgtaaattgtaagcgttaatattttgttaaaattcgcgttaaatttttgttaaatcagctcattttttaaccaataggccgaaatcggcaaaatcccttataaatcaaaagaatagaccgagatagggttgagtgttgttccagtttggaacaagagtccactattaaagaacgtggactccaacgtcaaagggcgaaaaaccgtctatcagggcgatggcccactacgtgaaccatcaccctaatcaagttttttggggtcgaggtgccgtaaagcactaaatcggaaccctaaagggagcccccgatttagagcttgacggggaaagccggcgaacgtggcgagaaaggaagggaagaaagcgaaaggagcgggcgctagggcgctggcaagtgtagcggtcacgctgcgcgtaaccaccacacccgccgcgcttaatgcgccgctacagggcgcgtcaggtggcacttttcggggaaatgtgcgcggaacccctatttgtttatttttctaaatacattcaaatatgtatccgctcatgagacaataaccctgataaatgcttcaataatattgaaaaaggaagagtcctgaggcggaaagaaccagctgtggaatgtgtgtcagttagggtgtggaaagtccccaggctccccagcaggcagaagtatgcaaagcatgcatctcaattagtcagcaaccaggtgtggaaagtccccaggctccccagcaggcagaagtatgcaaagcatgcatctcaattagtcagcaaccatagtcccgcccctaactccgcccatcccgcccctaactccgcccagttccgcccattctccgccccatggctgactaattttttttatttatgcagaggccgaggccgcctcggcctctgagctattccagaagtagtgaggaggcttttttggaggcctaggcttttgcaaagatcgatcaagagacaggatgaggatcgtttcgcatgattgaacaagatggattgcacgcaggttctccggccgcttgggtggagaggctattcggctatgactgggcacaacagacaatcggctgctctgatgccgccgtgttccggctgtcagcgcaggggcgcccggttctttttgtcaagaccgacctgtccggtgccctgaatgaactgcaagacgaggcagcgcggctatcgtggctggccacgacgggcgttccttgcgcagctgtgctcgacgttgtcactgaagcgggaagggactggctgctattgggcgaagtgccggggcaggatctcctgtcatctcaccttgctcctgccgagaaagtatccatcatggctgatgcaatgcggcggctgcatacgcttgatccggctacctgcccattcgaccaccaagcgaaacatcgcatcgagcgagcacgtactcggatggaagccggtcttgtcgatcaggatgatctggacgaagagcatcaggggctcgcgccagccgaactgttcgccaggctcaaggcgagcatgcccgacggcgaggatctcgtcgtgacccatggcgatgcctgcttgccgaatatcatggtggaaaatggccgcttttctggattcatcgactgtggccggctgggtgtggcggaccgctatcaggacatagcgttggctacccgtgatattgctgaagagcttggcggcgaatgggctgaccgcttcctcgtgctttacggtatcgccgctcccgattcgcagcgcatcgccttctatcgccttcttgacgagttcttctgagcgggactctggggttcgaaatgaccgaccaagcgacgcccaacctgccatcacgagatttcgattccaccgccgccttctatgaaaggttgggcttcggaatcgttttccgggacgccggctggatgatcctccagcgcggggatctcatgctggagttcttcgcccaccctagggggaggctaactgaaacacggaaggagacaataccggaaggaacccgcgctatgacggcaataaaaagacagaataaaacgcacggtgttgggtcgtttgttcataaacgcggggttcggtcccagggctggcactctgtcgataccccaccgagaccccattggggccaatacgcccgcgtttcttccttttccccaccccaccccccaagttcgggtgaaggcccagggctcgcagccaacgtcggggcggcaggccctgccatagcctcaggttactcatatatactttagattgatttaaaacttcatttttaatttaaaaggatctaggtgaagatcctttttgataatctcatgaccaaaatcccttaacgtgagttttcgttccactgagcgtcagaccccgtagaaaagatcaaaggatcttcttgagatcctttttttctgcgcgtaatctgctgcttgcaaacaaaaaaaccaccgctaccagcggtggtttgtttgccggatcaagagctaccaactctttttccgaaggtaactggcttcagcagagcgcagataccaaatactgttcttctagtgtagccgtagttaggccaccacttcaagaactctgtagcaccgcctacatacctcgctctgctaatcctgttaccagtggctgctgccagtggcgataagtcgtgtcttaccgggttggactcaagacgatagttaccggataaggcgcagcggtcgggctgaacggggggttcgtgcacacagcccagcttggagcgaacgacctacaccgaactgagatacctacagcgtgagctatgagaaagcgccacgcttcccgaagggagaaaggcggacaggtatccggtaagcggcagggtcggaacaggagagcgcacgagggagcttccagggggaaacgcctggtatctttatagtcctgtcgggtttcgccacctctgacttgagcgtcgatttttgtgatgctcgtcaggggggcggagcctatggaaaaacgccagcaacgcggcctttttacggttcctggccttttgctggccttttgctcacatgttctttcctgcgttatcccctgattctgtggataaccgtattaccgccatgcattagttattaatagtaatcaattacggggtcattagttcatagcccatatatggagttccgcgttacataacttacggtaaatggcccgcctggctgaccgcccaacgacccccgcccattgacgtcaataatgacgtatgttcccatagtaacgccaatagggactttccattgacgtcaatgggtggagtatttacggtaaactgcccacttggcagtacatcaa

SEQ ID NO: 67 - DNA, 5579 bp, Artificial Sequence
  Synthetic
atatatggagttccgcgttacataacttacggtaaatggcccgcctggctgaccgcccaacgacccccgcccattgacgtcaataatgacgtatgttcccatagtaacgccaatagggactttccattgacgtcaatgggtggagtatttacggtaaactgcccacttggcagtacatcaagtgtatcatatgccaagtacgccccctattgacgtcaatgacggtaaatggcccgcctggcattatgcccagtacatgaccttatgggactttcctacttggcagtacatctacgtattagtcatcgctattaccatggtgatgcggttttggcagtacatcaatgggcgtggatagcggtttgactcacggggatttccaagtctccaccccattgacgtcaatgggagtttgttttggcaccaaaatcaacgggactttccaaaatgtcgtaacaactccgccccattgacgcaaatgggcggtaggcgtgtacggtgggaggtctatataagcagagctggtttagtgaaccgtcagatccgctagcgctaccggactcagatcatggactggggcaccttgcaaacgatcttgggcggcgtcaataagcactctacatcaatcgggaagatatggcttacagtgttgtttatattcagaataatgatattggtggtcgccgcgaaagaggtatggggagatgagcaggcagactttgtatgtaacacattgcagccaggatgtaagaatgtatgctacgaccactactttccaatctcccacataaggctctgggctcttcagctcatctttgtttccacacccgcgttgctcgtggctatgcatgttgcctaccggcgacacgaaaaaaagagaaagttcataaagggtgaaatcaagagtgagttcaaggatatcgaggaaataaagactcagaaagttaggattgagggaagcctttggtggacttataccagttctatatttttccgagttattttcgaagcagccttcatgtacgtcttttatgtgatgtatgatgggttcagcatgcaacgactcgttaagtgtaatgcctggccgtgccccaatacagtggactgcttcgtttctcgacccaccgagaagacggtttttacagtctttatgattgccgtcagtggcatttgcatcctgctcaacgtgacagaattgtgttacttgctgattcggtattgctccgggaaaagcaagaaacctgttgatccaccggtcgccaccatggcgcgtaaggtcgatctcacctcctgcgatcgcgagccgatccacatccccggcagcattcagccgtgcggctgcctgctagcctgcgacgcgcaggcggtgcggatcacgcgcattacggaaaatgccggcgcgttctttggacgcgaaactccgcgggtcggtgagctactcgccgattacttcggcgagaccgaagcccatgcgctgcgcaacgcactggcgcagtcctccgatccaaagcgaccggcgctgatcttcggttggcgcgacggcctgaccggccgcaccttcgacatctcactgcatcgccatgacggtacatcgatcatcgagttcgagcctgcggcggccgaacaggccgacaatccgctgcggctgacgcggcagatcatcgcgcgcaccaaagaactgaagtcgctcgaagagatggccgcacgggtgccgcgctatctgcaggcgatgctcggctatcaccgcgtgatgttgtaccgcttcgcggacgacggctccgggatggtgatcggcgaggcgaagcgcagcgacctcgagagctttctcggtcagcactttccggcgtcgctggtcccgcagcaggcgcggctactgtacttgaagaacgcgatccgcgtggtctcggattcgcgcggcatcagcagccggatcgtgcccgagcacgacgcctccggcgccgcgctcgatctgtcgttcgcgcacctgcgcagcatctcgccctgccatctcgaatttctgcggaacatgggcgtcagcgcctcgatgtcgctgtcgatcatcattgacggcacgctatggggattgatcatctgtcatcattacgagccgcgtgccgtgccgatggcgcagcgcgtcgcggccgaaatgttcgccgacttcttatcgctgcacttcaccgccgcccaccaccaacgctaagcggccgcgactctagatcataatcagccataccacatttgtagaggttttacttgctttaaaaaacctcccacacctccccctgaacctgaaacataaaatgaatgcaattgttgttgttaacttgtttattgcagcttataatggttacaaataaagcaatagcatcacaaatttcacaaataaagcatttttttcactgcattctagttgtggtttgtccaaactcatcaatgtatcttaaggcgtaaattgtaagcgttaatattttgttaaaattcgcgttaaatttttgttaaatcagctcattttttaaccaataggccgaaatcggcaaaatcccttataaatcaaaagaatagaccgagatagggttgagtgttgttccagtttggaacaagagtccactattaaagaacgtggactccaacgtcaaagggcgaaaaaccgtctatcagggcgatggcccactacgtgaaccatcaccctaatcaagttttttggggtcgaggtgccgtaaagcactaaatcggaaccctaaagggagcccccgatttagagcttgacggggaaagccggcgaacgtggcgagaaaggaagggaagaaagcgaaaggagcgggcgctagggcgctggcaagtgtagcggtcacgctgcgcgtaaccaccacacccgccgcgcttaatgcgccgctacagggcgcgtcaggtggcacttttcggggaaatgtgcgcggaacccctatttgtttatttttctaaatacattcaaatatgtatccgctcatgagacaataaccctgataaatgcttcaataatattgaaaaaggaagagtcctgaggcggaaagaaccagctgtggaatgtgtgtcagttagggtgtggaaagtccccaggctccccagcaggcagaagtatgcaaagcatgcatctcaattagtcagcaaccaggtgtggaaagtccccaggctccccagcaggcagaagtatgcaaagcatgcatctcaattagtcagcaaccatagtcccgcccctaactccgcccatcccgcccctaactccgcccagttccgcccattctccgccccatggctgactaattttttttatttatgcagaggccgaggccgcctcggcctctgagctattccagaagtagtgaggaggcttttttggaggcctaggcttttgcaaagatcgatcaagagacaggatgaggatcgtttcgcatgattgaacaagatggattgcacgcaggttctccggccgcttgggtggagaggctattcggctatgactgggcacaacagacaatcggctgctctgatgccgccgtgttccggctgtcagcgcaggggcgcccggttctttttgtcaagaccgacctgtccggtgccctgaatgaactgcaagacgaggcagcgcggctatcgtggctggccacgacgggcgttccttgcgcagctgtgctcgacgttgtcactgaagcgggaagggactggctgctattgggcgaagtgccggggcaggatctcctgtcatctcaccttgctcctgccgagaaagtatccatcatggctgatgcaatgcggcggctgcatacgcttgatccggctacctgcccattcgaccaccaagcgaaacatcgcatcgagcgagcacgtactcggatggaagccggtcttgtcgatcaggatgatctggacgaagagcatcaggggctcgcgccagccgaactgttcgccaggctcaaggcgagcatgcccgacggcgaggatctcgtcgtgacccatggcgatgcctgcttgccgaatatcatggtggaaaatggccgcttttctggattcatcgactgtggccggctgggtgtggcggaccgctatcaggacatagcgttggctacccgtgatattgctgaagagcttggcggcgaatgggctgaccgcttcctcgtgctttacggtatcgccgctcccgattcgcagcgcatcgccttctatcgccttcttgacgagttcttctgagcgggactctggggttcgaaatgaccgaccaagcgacgcccaacctgccatcacgagatttcgattccaccgccgccttctatgaaaggttgggcttcggaatcgttttccgggacgccggctggatgatcctccagcgcggggatctcatgctggagttcttcgcccaccctagggggaggctaactgaaacacggaaggagacaataccggaaggaacccgcgctatgacggcaataaaaagacagaataaaacgcacggtgttgggtcgtttgttcataaacgcggggttcggtcccagggctggcactctgtcgataccccaccgagaccccattggggccaatacgcccgcgtttcttccttttccccaccccaccccccaagttcgggtgaaggcccagggctcgcagccaacgtcggggcggcaggccctgccatagcctcaggttactcatatatactttagattgatttaaaacttcatttttaatttaaaaggatctaggtgaagatcctttttgataatctcatgaccaaaatcccttaacgtgagttttcgttccactgagcgtcagaccccgtagaaaagatcaaaggatcttcttgagatcctttttttctgcgcgtaatctgctgcttgcaaacaaaaaaaccaccgctaccagcggtggtttgtttgccggatcaagagctaccaactctttttccgaaggtaactggcttcagcagagcgcagataccaaatactgttcttctagtgtagccgtagttaggccaccacttcaagaactctgtagcaccgcctacatacctcgctctgctaatcctgttaccagtggctgctgccagtggcgataagtcgtgtcttaccgggttggactcaagacgatagttaccggataaggcgcagcggtcgggctgaacggggggttcgtgcacacagcccagcttggagcgaacgacctacaccgaactgagatacctacagcgtgagctatgagaaagcgccacgcttcccgaagggagaaaggcggacaggtatccggtaagcggcagggtcggaacaggagagcgcacgagggagcttccagggggaaacgcctggtatctttatagtcctgtcgggtttcgccacctctgacttgagcgtcgatttttgtgatgctcgtcaggggggcggagcctatggaaaaacgccagcaacgcggcctttttacggttcctggccttttgctggccttttgctcacatgttctttcctgcgttatcccctgattctgtggataaccgtattaccgccatgcattagttattaatagtaatcaattacggggtcattagttcatagccc

SEQ ID NO: 68 - DNA, 5707 bp, Artificial Sequence
  Synthetic
gtgtatcatatgccaagtacgccccctattgacgtcaatgacggtaaatggcccgcctggcattatgcccagtacatgaccttatgggactttcctacttggcagtacatctacgtattagtcatcgctattaccatggtgatgcggttttggcagtacatcaatgggcgtggatagcggtttgactcacggggatttccaagtctccaccccattgacgtcaatgggagtttgttttggcaccaaaatcaacgggactttccaaaatgtcgtaacaactccgccccattgacgcaaatgggcggtaggcgtgtacggtgggaggtctatataagcagagctggtttagtgaaccgtcagatccgctagcgctaccggactcagatctcgagctcatggattggggtacacttcataccttcattgggggagtgaataagcactcaacgagcataggcaaggtctggatcactgtcatttttatattccgcgtgatgattctcgttgtggcggctcaagaagtttggggggacgagcaggaagatttcgtgtgtaacacacttcagccgggttgtaaaaacgtgtgctacgatcactttttcccagtttcacacataaggctgtgggcgctgcaactcatctttgtgtccacgcccgccctgctcgtggcaatgcatgttgcatattacagacatgagactactcgaaagtttagacgcggtgagaagcggaatgactttaaggacatcgaagacattaagaagcaaaaggtaaggatcgaggggtcactctggtggacatatactagctcaatttttttcagaatcatctttgaggccgctttcatgtacgttttttactttctgtataacgggtaccatttgccctgggtactcaagtgtggtattgacccttgcccaaacctggtcgattgttttatctcacgccccacagaaaagacagttttcaccattttcatgatctcagcctcagtcatctgtatgttgttgaatgtagctgagctttgttatctgttgcttaaggtgtgtttcagaagaagcaagagagctcaaacacagaaaaaccaccccaatcacgctctgaaagagagcaaacagaatgagatgaatgaactgatatctgacagtggtcaaaacgctatcactggcttccccagcggaggttcaggcggtgatccaccggtcgccaccatggcgcgtaaggtcgatctcacctcctgcgatcgcgagccgatccacatccccggcagcattcagccgtgcggctgcctgctagcctgcgacgcgcaggcggtgcggatcacgcgcattacggaaaatgccggcgcgttctttggacgcgaaactccgcgggtcggtgagctactcgccgattacttcggcgagaccgaagcccatgcgctgcgcaacgcactggcgcagtcctccgatccaaagcgaccggcgctgatcttcggttggcgcgacggcctgaccggccgcaccttcgacatctcactgcatcgccatgacggtacatcgatcatcgagttcgagcctgcggcggccgaacaggccgacaatccgctgcggctgacgcggcagatcatcgcgcgcaccaaagaactgaagtcgctcgaagagatggccgcacgggtgccgcgctatctgcaggcgatgctcggctatcaccgcgtgatgttgtaccgcttcgcggacgacggctccgggatggtgatcggcgaggcgaagcgcagcgacctcgagagctttctcggtcagcactttccggcgtcgctggtcccgcagcaggcgcggctactgtacttgaagaacgcgatccgcgtggtctcggattcgcgcggcatcagcagccggatcgtgcccgagcacgacgcctccggcgccgcgctcgatctgtcgttcgcgcacctgcgcagcatctcgccctgccatctcgaatttctgcggaacatgggcgtcagcgcctcgatgtcgctgtcgatcatcattgacggcacgctatggggattgatcatctgtcatcattacgagccgcgtgccgtgccgatggcgcagcgcgtcgcggccgaaatgttcgccgacttcttatcgctgcacttcaccgccgcccaccaccaacgctaagcggccgcgactctagatcataatcagccataccacatttgtagaggttttacttgctttaaaaaacctcccacacctccccctgaacctgaaacataaaatgaatgcaattgttgttgttaacttgtttattgcagcttataatggttacaaataaagcaatagcatcacaaatttcacaaataaagcatttttttcactgcattctagttgtggtttgtccaaactcatcaatgtatcttaaggcgtaaattgtaagcgttaatattttgttaaaattcgcgttaaatttttgttaaatcagctcattttttaaccaataggccgaaatcggcaaaatcccttataaatcaaaagaatagaccgagatagggttgagtgttgttccagtttggaacaagagtccactattaaagaacgtggactccaacgtcaaagggcgaaaaaccgtctatcagggcgatggcccactacgtgaaccatcaccctaatcaagttttttggggtcgaggtgccgtaaagcactaaatcggaaccctaaagggagcccccgatttagagcttgacggggaaagccggcgaacgtggcgagaaaggaagggaagaaagcgaaaggagcgggcgctagggcgctggcaagtgtagcggtcacgctgcgcgtaaccaccacacccgccgcgcttaatgcgccgctacagggcgcgtcaggtggcacttttcggggaaatgtgcgcggaacccctatttgtttatttttctaaatacattcaaatatgtatccgctcatgagacaataaccctgataaatgcttcaataatattgaaaaaggaagagtcctgaggcggaaagaaccagctgtggaatgtgtgtcagttagggtgtggaaagtccccaggctccccagcaggcagaagtatgcaaagcatgcatctcaattagtcagcaaccaggtgtggaaagtccccaggctccccagcaggcagaagtatgcaaagcatgcatctcaattagtcagcaaccatagtcccgcccctaactccgcccatcccgcccctaactccgcccagttccgcccattctccgccccatggctgactaattttttttatttatgcagaggccgaggccgcctcggcctctgagctattccagaagtagtgaggaggcttttttggaggcctaggcttttgcaaagatcgatcaagagacaggatgaggatcgtttcgcatgattgaacaagatggattgcacgcaggttctccggccgcttgggtggagaggctattcggctatgactgggcacaacagacaatcggctgctctgatgccgccgtgttccggctgtcagcgcaggggcgcccggttctttttgtcaagaccgacctgtccggtgccctgaatgaactgcaagacgaggcagcgcggctatcgtggctggccacgacgggcgttccttgcgcagctgtgctcgacgttgtcactgaagcgggaagggactggctgctattgggcgaagtgccggggcaggatctcctgtcatctcaccttgctcctgccgagaaagtatccatcatggctgatgcaatgcggcggctgcatacgcttgatccggctacctgcccattcgaccaccaagcgaaacatcgcatcgagcgagcacgtactcggatggaagccggtcttgtcgatcaggatgatctggacgaagagcatcaggggctcgcgccagccgaactgttcgccaggctcaaggcgagcatgcccgacggcgaggatctcgtcgtgacccatggcgatgcctgcttgccgaatatcatggtggaaaatggccgcttttctggattcatcgactgtggccggctgggtgtggcggaccgctatcaggacatagcgttggctacccgtgatattgctgaagagcttggcggcgaatgggctgaccgcttcctcgtgctttacggtatcgccgctcccgattcgcagcgcatcgccttctatcgccttcttgacgagttcttctgagcgggactctggggttcgaaatgaccgaccaagcgacgcccaacctgccatcacgagatttcgattccaccgccgccttctatgaaaggttgggcttcggaatcgttttccgggacgccggctggatgatcctccagcgcggggatctcatgctggagttcttcgcccaccctagggggaggctaactgaaacacggaaggagacaataccggaaggaacccgcgctatgacggcaataaaaagacagaataaaacgcacggtgttgggtcgtttgttcataaacgcggggttcggtcccagggctggcactctgtcgataccccaccgagaccccattggggccaatacgcccgcgtttcttccttttccccaccccaccccccaagttcgggtgaaggcccagggctcgcagccaacgtcggggcggcaggccctgccatagcctcaggttactcatatatactttagattgatttaaaacttcatttttaatttaaaaggatctaggtgaagatcctttttgataatctcatgaccaaaatcccttaacgtgagttttcgttccactgagcgtcagaccccgtagaaaagatcaaaggatcttcttgagatcctttttttctgcgcgtaatctgctgcttgcaaacaaaaaaaccaccgctaccagcggtggtttgtttgccggatcaagagctaccaactctttttccgaaggtaactggcttcagcagagcgcagataccaaatactgttcttctagtgtagccgtagttaggccaccacttcaagaactctgtagcaccgcctacatacctcgctctgctaatcctgttaccagtggctgctgccagtggcgataagtcgtgtcttaccgggttggactcaagacgatagttaccggataaggcgcagcggtcgggctgaacggggggttcgtgcacacagcccagcttggagcgaacgacctacaccgaactgagatacctacagcgtgagctatgagaaagcgccacgcttcccgaagggagaaaggcggacaggtatccggtaagcggcagggtcggaacaggagagcgcacgagggagcttccagggggaaacgcctggtatctttatagtcctgtcgggtttcgccacctctgacttgagcgtcgatttttgtgatgctcgtcaggggggcggagcctatggaaaaacgccagcaacgcggcctttttacggttcctggccttttgctggccttttgctcacatgttctttcctgcgttatcccctgattctgtggataaccgtattaccgccatgcattagttattaatagtaatcaattacggggtcattagttcatagcccatatatggagttccgcgttacataacttacggtaaatggcccgcctggctgaccgcccaacgacccccgcccattgacgtcaataatgacgtatgttcccatagtaacgccaatagggactttccattgacgtcaatgggtggagtatttacggtaaactgcccacttggcagtacatcaa

SEQ ID NO: 69 - DNA, 5722 bp, Artificial Sequence
  Synthetic
gtgtatcatatgccaagtacgccccctattgacgtcaatgacggtaaatggcccgcctggcattatgcccagtacatgaccttatgggactttcctacttggcagtacatctacgtattagtcatcgctattaccatggtgatgcggttttggcagtacatcaatgggcgtggatagcggtttgactcacggggatttccaagtctccaccccattgacgtcaatgggagtttgttttggcaccaaaatcaacgggactttccaaaatgtcgtaacaactccgccccattgacgcaaatgggcggtaggcgtgtacggtgggaggtctatataagcagagctggtttagtgaaccgtcagatccgctagcgctaccggactcagatctcgagctcatgaattgggcattcttgcaaggcttgctttctggtgtcaataagtattcaacggtgctgtccaggatatggctctctgttgtgttcatttttcgggttctggtatacgtggttgcggcagaggaagtgtgggatgacgaacagaaggacttcgtgtgcaacactaaacaaccgggctgtccgaatgtgtgctacgatgagttctttcccgtaagccacgtccgattgtgggcgctccagttgatcttggtaacatgtccctctctccttgtcgtgatgcacgtagcatatcgagaggaacgagaacggaagcaccaccttaaacacggcccaaatgcaccgtccttgtatgacaatcttagtaaaaaacgaggggggctttggtggacatacctcctctctctcatatttaaggcagccgttgacgccggattcctctatatttttcaccgactctacaaagactacgatatgccgcgcgtcgtggcctgcagtgtcgaaccctgccctcatactgttgattgctatatttctcgccccaccgagaagaaagtttttacatatttcatggtgaccacagcggcgatttgcatcttgctgaatctcagtgaggtgttctatctcgtcgggaagaggtgtatggaaatctttggacctagacatcgccgacccaggtgtagggaatgtttgcctgatacctgtcccccatacgtgttgtcccaaggcggacatccggaagacgggaactcagtattgatgaaggccggctcagcgccggtcgatgccggagggtacccgggaggttcaggcggtgatccaccggtcgccaccatggcgcgtaaggtcgatctcacctcctgcgatcgcgagccgatccacatccccggcagcattcagccgtgcggctgcctgctagcctgcgacgcgcaggcggtgcggatcacgcgcattacggaaaatgccggcgcgttctttggacgcgaaactccgcgggtcggtgagctactcgccgattacttcggcgagaccgaagcccatgcgctgcgcaacgcactggcgcagtcctccgatccaaagcgaccggcgctgatcttcggttggcgcgacggcctgaccggccgcaccttcgacatctcactgcatcgccatgacggtacatcgatcatcgagttcgagcctgcggcggccgaacaggccgacaatccgctgcggctgacgcggcagatcatcgcgcgcaccaaagaactgaagtcgctcgaagagatggccgcacgggtgccgcgctatctgcaggcgatgctcggctatcaccgcgtgatgttgtaccgcttcgcggacgacggctccgggatggtgatcggcgaggcgaagcgcagcgacctcgagagctttctcggtcagcactttccggcgtcgctggtcccgcagcaggcgcggctactgtacttgaagaacgcgatccgcgtggtctcggattcgcgcggcatcagcagccggatcgtgcccgagcacgacgcctccggcgccgcgctcgatctgtcgttcgcgcacctgcgcagcatctcgccctgccatctcgaatttctgcggaacatgggcgtcagcgcctcgatgtcgctgtcgatcatcattgacggcacgctatggggattgatcatctgtcatcattacgagccgcgtgccgtgccgatggcgcagcgcgtcgcggccgaaatgttcgccgacttcttatcgctgcacttcaccgccgcccaccaccaacgctaagcggccgcgactctagatcataatcagccataccacatttgtagaggttttacttgctttaaaaaacctcccacacctccccctgaacctgaaacataaaatgaatgcaattgttgttgttaacttgtttattgcagcttataatggttacaaataaagcaatagcatcacaaatttcacaaataaagcatttttttcactgcattctagttgtggtttgtccaaactcatcaatgtatcttaaggcgtaaattgtaagcgttaatattttgttaaaattcgcgttaaatttttgttaaatcagctcattttttaaccaataggccgaaatcggcaaaatcccttataaatcaaaagaatagaccgagatagggttgagtgttgttccagtttggaacaagagtccactattaaagaacgtggactccaacgtcaaagggcgaaaaaccgtctatcagggcgatggcccactacgtgaaccatcaccctaatcaagttttttggggtcgaggtgccgtaaagcactaaatcggaaccctaaagggagcccccgatttagagcttgacggggaaagccggcgaacgtggcgagaaaggaagggaagaaagcgaaaggagcgggcgctagggcgctggcaagtgtagcggtcacgctgcgcgtaaccaccacacccgccgcgcttaatgcgccgctacagggcgcgtcaggtggcacttttcggggaaatgtgcgcggaacccctatttgtttatttttctaaatacattcaaatatgtatccgctcatgagacaataaccctgataaatgcttcaataatattgaaaaaggaagagtcctgaggcggaaagaaccagctgtggaatgtgtgtcagttagggtgtggaaagtccccaggctccccagcaggcagaagtatgcaaagcatgcatctcaattagtcagcaaccaggtgtggaaagtccccaggctccccagcaggcagaagtatgcaaagcatgcatctcaattagtcagcaaccatagtcccgcccctaactccgcccatcccgcccctaactccgcccagttccgcccattctccgccccatggctgactaattttttttatttatgcagaggccgaggccgcctcggcctctgagctattccagaagtagtgaggaggcttttttggaggcctaggcttttgcaaagatcgatcaagagacaggatgaggatcgtttcgcatgattgaacaagatggattgcacgcaggttctccggccgcttgggtggagaggctattcggctatgactgggcacaacagacaatcggctgctctgatgccgccgtgttccggctgtcagcgcaggggcgcccggttctttttgtcaagaccgacctgtccggtgccctgaatgaactgcaagacgaggcagcgcggctatcgtggctggccacgacgggcgttccttgcgcagctgtgctcgacgttgtcactgaagcgggaagggactggctgctattgggcgaagtgccggggcaggatctcctgtcatctcaccttgctcctgccgagaaagtatccatcatggctgatgcaatgcggcggctgcatacgcttgatccggctacctgcccattcgaccaccaagcgaaacatcgcatcgagcgagcacgtactcggatggaagccggtcttgtcgatcaggatgatctggacgaagagcatcaggggctcgcgccagccgaactgttcgccaggctcaaggcgagcatgcccgacggcgaggatctcgtcgtgacccatggcgatgcctgcttgccgaatatcatggtggaaaatggccgcttttctggattcatcgactgtggccggctgggtgtggcggaccgctatcaggacatagcgttggctacccgtgatattgctgaagagcttggcggcgaatgggctgaccgcttcctcgtgctttacggtatcgccgctcccgattcgcagcgcatcgccttctatcgccttcttgacgagttcttctgagcgggactctggggttcgaaatgaccgaccaagcgacgcccaacctgccatcacgagatttcgattccaccgccgccttctatgaaaggttgggcttcggaatcgttttccgggacgccggctggatgatcctccagcgcggggatctcatgctggagttcttcgcccaccctagggggaggctaactgaaacacggaaggagacaataccggaaggaacccgcgctatgacggcaataaaaagacagaataaaacgcacggtgttgggtcgtttgttcataaacgcggggttcggtcccagggctggcactctgtcgataccccaccgagaccccattggggccaatacgcccgcgtttcttccttttccccaccccaccccccaagttcgggtgaaggcccagggctcgcagccaacgtcggggcggcaggccctgccatagcctcaggttactcatatatactttagattgatttaaaacttcatttttaatttaaaaggatctaggtgaagatcctttttgataatctcatgaccaaaatcccttaacgtgagttttcgttccactgagcgtcagaccccgtagaaaagatcaaaggatcttcttgagatcctttttttctgcgcgtaatctgctgcttgcaaacaaaaaaaccaccgctaccagcggtggtttgtttgccggatcaagagctaccaactctttttccgaaggtaactggcttcagcagagcgcagataccaaatactgttcttctagtgtagccgtagttaggccaccacttcaagaactctgtagcaccgcctacatacctcgctctgctaatcctgttaccagtggctgctgccagtggcgataagtcgtgtcttaccgggttggactcaagacgatagttaccggataaggcgcagcggtcgggctgaacggggggttcgtgcacacagcccagcttggagcgaacgacctacaccgaactgagatacctacagcgtgagctatgagaaagcgccacgcttcccgaagggagaaaggcggacaggtatccggtaagcggcagggtcggaacaggagagcgcacgagggagcttccagggggaaacgcctggtatctttatagtcctgtcgggtttcgccacctctgacttgagcgtcgatttttgtgatgctcgtcaggggggcggagcctatggaaaaacgccagcaacgcggcctttttacggttcctggccttttgctggccttttgctcacatgttctttcctgcgttatcccctgattctgtggataaccgtattaccgccatgcattagttattaatagtaatcaattacggggtcattagttcatagcccatatatggagttccgcgttacataacttacggtaaatggcccgcctggctgaccgcccaacgacccccgcccattgacgtcaataatgacgtatgttcccatagtaacgccaatagggactttccattgacgtcaatgggtggagtatttacggtaaactgcccacttggcagtacatcaa

SEQ ID NO: 70 - DNA, 5734 bp, Artificial Sequence
  Synthetic
gtgtatcatatgccaagtacgccccctattgacgtcaatgacggtaaatggcccgcctggcattatgcccagtacatgaccttatgggactttcctacttggcagtacatctacgtattagtcatcgctattaccatggtgatgcggttttggcagtacatcaatgggcgtggatagcggtttgactcacggggatttccaagtctccaccccattgacgtcaatgggagtttgttttggcaccaaaatcaacgggactttccaaaatgtcgtaacaactccgccccattgacgcaaatgggcggtaggcgtgtacggtgggaggtctatataagcagagctggtttagtgaaccgtcagatccgctagcgctaccggactcagatctcgagctcatggattggaagaccttgcaagcgctccttagcggcgtgaacaaatattcaactgcttttggaagaatttggctcagtgtcgtattcgtcttccgcgtgttggtgtacgtcgtagccgcagagcgcgtttggggtgatgagcaaaaagacttcgactgtaacacgaaacaacccggctgcacaaatgtttgctatgacaactatttccccatcagtaatataaggttgtgggcgctccagcttattttcgtgacctgtccctcacttctggttatcttgcatgtcgcgtaccgggaagaacgcgagcgccggcataggcaaaaacacggcgaccaatgtgcaaaactttacgacaacgccggcaagaaacatgggggcctctggtggacttatcttttttcattgatttttaaactcataatagagttcttgtttctgtatcttctccatactttgtggcatggattcaatatgccgcgccttgtgcaatgtgcaaacgtagcgccgtgccccaacatcgtcgactgttatatcgcccggcctacagagaaaaaaatatttacctacttcatggtgggtgcatcagctgtatgtatcgtcctgactatctgcgagctgtgttacctcatttgtcatcgggtcctccgcggtttgcataaagataaaccgcgcggaggctgctccccaagtagcagcgcgtcaagggcgtccacatgccgctgccaccataaacttgtggaggcaggagaggttgaccccgatcctggaaataacaaactccaagcctctgctcctaatttgacgcccattggaggttcaggcggtgatccaccggtcgccaccatggcgcgtaaggtcgatctcacctcctgcgatcgcgagccgatccacatccccggcagcattcagccgtgcggctgcctgctagcctgcgacgcgcaggcggtgcggatcacgcgcattacggaaaatgccggcgcgttctttggacgcgaaactccgcgggtcggtgagctactcgccgattacttcggcgagaccgaagcccatgcgctgcgcaacgcactggcgcagtcctccgatccaaagcgaccggcgctgatcttcggttggcgcgacggcctgaccggccgcaccttcgacatctcactgcatcgccatgacggtacatcgatcatcgagttcgagcctgcggcggccgaacaggccgacaatccgctgcggctgacgcggcagatcatcgcgcgcaccaaagaactgaagtcgctcgaagagatggccgcacgggtgccgcgctatctgcaggcgatgctcggctatcaccgcgtgatgttgtaccgcttcgcggacgacggctccgggatggtgatcggcgaggcgaagcgcagcgacctcgagagctttctcggtcagcactttccggcgtcgctggtcccgcagcaggcgcggctactgtacttgaagaacgcgatccgcgtggtctcggattcgcgcggcatcagcagccggatcgtgcccgagcacgacgcctccggcgccgcgctcgatctgtcgttcgcgcacctgcgcagcatctcgccctgccatctcgaatttctgcggaacatgggcgtcagcgcctcgatgtcgctgtcgatcatcattgacggcacgctatggggattgatcatctgtcatcattacgagccgcgtgccgtgccgatggcgcagcgcgtcgcggccgaaatgttcgccgacttcttatcgctgcacttcaccgccgcccaccaccaacgctaagcggccgcgactctagatcataatcagccataccacatttgtagaggttttacttgctttaaaaaacctcccacacctccccctgaacctgaaacataaaatgaatgcaattgttgttgttaacttgtttattgcagcttataatggttacaaataaagcaatagcatcacaaatttcacaaataaagcatttttttcactgcattctagttgtggtttgtccaaactcatcaatgtatcttaaggcgtaaattgtaagcgttaatattttgttaaaattcgcgttaaatttttgttaaatcagctcattttttaaccaataggccgaaatcggcaaaatcccttataaatcaaaagaatagaccgagatagggttgagtgttgttccagtttggaacaagagtccactattaaagaacgtggactccaacgtcaaagggcgaaaaaccgtctatcagggcgatggcccactacgtgaaccatcaccctaatcaagttttttggggtcgaggtgccgtaaagcactaaatcggaaccctaaagggagcccccgatttagagcttgacggggaaagccggcgaacgtggcgagaaaggaagggaagaaagcgaaaggagcgggcgctagggcgctggcaagtgtagcggtcacgctgcgcgtaaccaccacacccgccgcgcttaatgcgccgctacagggcgcgtcaggtggcacttttcggggaaatgtgcgcggaacccctatttgtttatttttctaaatacattcaaatatgtatccgctcatgagacaataaccctgataaatgcttcaataatattgaaaaaggaagagtcctgaggcggaaagaaccagctgtggaatgtgtgtcagttagggtgtggaaagtccccaggctccccagcaggcagaagtatgcaaagcatgcatctcaattagtcagcaaccaggtgtggaaagtccccaggctccccagcaggcagaagtatgcaaagcatgcatctcaattagtcagcaaccatagtcccgcccctaactccgcccatcccgcccctaactccgcccagttccgcccattctccgccccatggctgactaattttttttatttatgcagaggccgaggccgcctcggcctctgagctattccagaagtagtgaggaggcttttttggaggcctaggcttttgcaaagatcgatcaagagacaggatgaggatcgtttcgcatgattgaacaagatggattgcacgcaggttctccggccgcttgggtggagaggctattcggctatgactgggcacaacagacaatcggctgctctgatgccgccgtgttccggctgtcagcgcaggggcgcccggttctttttgtcaagaccgacctgtccggtgccctgaatgaactgcaagacgaggcagcgcggctatcgtggctggccacgacgggcgttccttgcgcagctgtgctcgacgttgtcactgaagcgggaagggactggctgctattgggcgaagtgccggggcaggatctcctgtcatctcaccttgctcctgccgagaaagtatccatcatggctgatgcaatgcggcggctgcatacgcttgatccggctacctgcccattcgaccaccaagcgaaacatcgcatcgagcgagcacgtactcggatggaagccggtcttgtcgatcaggatgatctggacgaagagcatcaggggctcgcgccagccgaactgttcgccaggctcaaggcgagcatgcccgacggcgaggatctcgtcgtgacccatggcgatgcctgcttgccgaatatcatggtggaaaatggccgcttttctggattcatcgactgtggccggctgggtgtggcggaccgctatcaggacatagcgttggctacccgtgatattgctgaagagcttggcggcgaatgggctgaccgcttcctcgtgctttacggtatcgccgctcccgattcgcagcgcatcgccttctatcgccttcttgacgagttcttctgagcgggactctggggttcgaaatgaccgaccaagcgacgcccaacctgccatcacgagatttcgattccaccgccgccttctatgaaaggttgggcttcggaatcgttttccgggacgccggctggatgatcctccagcgcggggatctcatgctggagttcttcgcccaccctagggggaggctaactgaaacacggaaggagacaataccggaaggaacccgcgctatgacggcaataaaaagacagaataaaacgcacggtgttgggtcgtttgttcataaacgcggggttcggtcccagggctggcactctgtcgataccccaccgagaccccattggggccaatacgcccgcgtttcttccttttccccaccccaccccccaagttcgggtgaaggcccagggctcgcagccaacgtcggggcggcaggccctgccatagcctcaggttactcatatatactttagattgatttaaaacttcatttttaatttaaaaggatctaggtgaagatcctttttgataatctcatgaccaaaatcccttaacgtgagttttcgttccactgagcgtcagaccccgtagaaaagatcaaaggatcttcttgagatcctttttttctgcgcgtaatctgctgcttgcaaacaaaaaaaccaccgctaccagcggtggtttgtttgccggatcaagagctaccaactctttttccgaaggtaactggcttcagcagagcgcagataccaaatactgttcttctagtgtagccgtagttaggccaccacttcaagaactctgtagcaccgcctacatacctcgctctgctaatcctgttaccagtggctgctgccagtggcgataagtcgtgtcttaccgggttggactcaagacgatagttaccggataaggcgcagcggtcgggctgaacggggggttcgtgcacacagcccagcttggagcgaacgacctacaccgaactgagatacctacagcgtgagctatgagaaagcgccacgcttcccgaagggagaaaggcggacaggtatccggtaagcggcagggtcggaacaggagagcgcacgagggagcttccagggggaaacgcctggtatctttatagtcctgtcgggtttcgccacctctgacttgagcgtcgatttttgtgatgctcgtcaggggggcggagcctatggaaaaacgccagcaacgcggcctttttacggttcctggccttttgctggccttttgctcacatgttctttcctgcgttatcccctgattctgtggataaccgtattaccgccatgcattagttattaatagtaatcaattacggggtcattagttcatagcccatatatggagttccgcgttacataacttacggtaaatggcccgcctggctgaccgcccaacgacccccgcccattgacgtcaataatgacgtatgttcccatagtaacgccaatagggactttccattgacgtcaatgggtggagtatttacggtaaactgcccacttggcagtacatcaa

SEQ ID NO: 71 - DNA, 5743 bp, Artificial Sequence
  Synthetic
gtgtatcatatgccaagtacgccccctattgacgtcaatgacggtaaatggcccgcctggcattatgcccagtacatgaccttatgggactttcctacttggcagtacatctacgtattagtcatcgctattaccatggtgatgcggttttggcagtacatcaatgggcgtggatagcggtttgactcacggggatttccaagtctccaccccattgacgtcaatgggagtttgttttggcaccaaaatcaacgggactttccaaaatgtcgtaacaactccgccccattgacgcaaatgggcggtaggcgtgtacggtgggaggtctatataagcagagctggtttagtgaaccgtcagatccgctagcgctaccggactcagatctcgagctcatgaattggagcatttttgaaggcctgttgagtggggtgaacaaatattccaccgccttcggtcggatctggttgtctcttgtttttatatttcgcgtactggtatacctcgtcacagccgaacgggtctggtccgatgaccacaaagattttgattgcaacacgcgccaacctggatgcagtaacgtctgctttgacgaatttttccctgttagtcatgtaaggctctgggctttgcaactgattcttgtaacctgcccttcactgctcgtagtaatgcacgtcgcatacagggaggtgcaggagaagaggcaccgcgaagctcatggggaaaacagtgggcgactctacttgaacccaggtaagaaaagaggggggctttggtggacttacgtttgctctctcgtattcaaagcatccgtcgacattgcatttctctacgtcttccattccttttacccaaagtacattctgccaccagtagtcaaatgccacgcggatccttgccccaacatagtggattgctttattagcaagccctctgaaaaaaatatctttactcttttcatggtggctacggcggcaatctgcatcctccttaatcttgtggagttgatttacctcgtctctaaacggtgtcacgagtgcctcgcagcccggaaggcccaggcgatgtgtactggccaccaccctcacgggactacttcatcctgcaagcaagacgacctcttgtctggggatttgatattcttggggagcgattctcacccacccttgcttccggacaggcccagggatcatgtgaaaaagacgatattgggaggttcaggcggtgatccaccggtcgccaccatggcgcgtaaggtcgatctcacctcctgcgatcgcgagccgatccacatccccggcagcattcagccgtgcggctgcctgctagcctgcgacgcgcaggcggtgcggatcacgcgcattacggaaaatgccggcgcgttctttggacgcgaaactccgcgggtcggtgagctactcgccgattacttcggcgagaccgaagcccatgcgctgcgcaacgcactggcgcagtcctccgatccaaagcgaccggcgctgatcttcggttggcgcgacggcctgaccggccgcaccttcgacatctcactgcatcgccatgacggtacatcgatcatcgagttcgagcctgcggcggccgaacaggccgacaatccgctgcggctgacgcggcagatcatcgcgcgcaccaaagaactgaagtcgctcgaagagatggccgcacgggtgccgcgctatctgcaggcgatgctcggctatcaccgcgtgatgttgtaccgcttcgcggacgacggctccgggatggtgatcggcgaggcgaagcgcagcgacctcgagagctttctcggtcagcactttccggcgtcgctggtcccgcagcaggcgcggctactgtacttgaagaacgcgatccgcgtggtctcggattcgcgcggcatcagcagccggatcgtgcccgagcacgacgcctccggcgccgcgctcgatctgtcgttcgcgcacctgcgcagcatctcgccctgccatctcgaatttctgcggaacatgggcgtcagcgcctcgatgtcgctgtcgatcatcattgacggcacgctatggggattgatcatctgtcatcattacgagccgcgtgccgtgccgatggcgcagcgcgtcgcggccgaaatgttcgccgacttcttatcgctgcacttcaccgccgcccaccaccaacgctaagcggccgcgactctagatcataatcagccataccacatttgtagaggttttacttgctttaaaaaacctcccacacctccccctgaacctgaaacataaaatgaatgcaattgttgttgttaacttgtttattgcagcttataatggttacaaataaagcaatagcatcacaaatttcacaaataaagcatttttttcactgcattctagttgtggtttgtccaaactcatcaatgtatcttaaggcgtaaattgtaagcgttaatattttgttaaaattcgcgttaaatttttgttaaatcagctcattttttaaccaataggccgaaatcggcaaaatcccttataaatcaaaagaatagaccgagatagggttgagtgttgttccagtttggaacaagagtccactattaaagaacgtggactccaacgtcaaagggcgaaaaaccgtctatcagggcgatggcccactacgtgaaccatcaccctaatcaagttttttggggtcgaggtgccgtaaagcactaaatcggaaccctaaagggagcccccgatttagagcttgacggggaaagccggcgaacgtggcgagaaaggaagggaagaaagcgaaaggagcgggcgctagggcgctggcaagtgtagcggtcacgctgcgcgtaaccaccacacccgccgcgcttaatgcgccgctacagggcgcgtcaggtggcacttttcggggaaatgtgcgcggaacccctatttgtttatttttctaaatacattcaaatatgtatccgctcatgagacaataaccctgataaatgcttcaataatattgaaaaaggaagagtcctgaggcggaaagaaccagctgtggaatgtgtgtcagttagggtgtggaaagtccccaggctccccagcaggcagaagtatgcaaagcatgcatctcaattagtcagcaaccaggtgtggaaagtccccaggctccccagcaggcagaagtatgcaaagcatgcatctcaattagtcagcaaccatagtcccgcccctaactccgcccatcccgcccctaactccgcccagttccgcccattctccgccccatggctgactaattttttttatttatgcagaggccgaggccgcctcggcctctgagctattccagaagtagtgaggaggcttttttggaggcctaggcttttgcaaagatcgatcaagagacaggatgaggatcgtttcgcatgattgaacaagatggattgcacgcaggttctccggccgcttgggtggagaggctattcggctatgactgggcacaacagacaatcggctgctctgatgccgccgtgttccggctgtcagcgcaggggcgcccggttctttttgtcaagaccgacctgtccggtgccctgaatgaactgcaagacgaggcagcgcggctatcgtggctggccacgacgggcgttccttgcgcagctgtgctcgacgttgtcactgaagcgggaagggactggctgctattgggcgaagtgccggggcaggatctcctgtcatctcaccttgctcctgccgagaaagtatccatcatggctgatgcaatgcggcggctgcatacgcttgatccggctacctgcccattcgaccaccaagcgaaacatcgcatcgagcgagcacgtactcggatggaagccggtcttgtcgatcaggatgatctggacgaagagcatcaggggctcgcgccagccgaactgttcgccaggctcaaggcgagcatgcccgacggcgaggatctcgtcgtgacccatggcgatgcctgcttgccgaatatcatggtggaaaatggccgcttttctggattcatcgactgtggccggctgggtgtggcggaccgctatcaggacatagcgttggctacccgtgatattgctgaagagcttggcggcgaatgggctgaccgcttcctcgtgctttacggtatcgccgctcccgattcgcagcgcatcgccttctatcgccttcttgacgagttcttctgagcgggactctggggttcgaaatgaccgaccaagcgacgcccaacctgccatcacgagatttcgattccaccgccgccttctatgaaaggttgggcttcggaatcgttttccgggacgccggctggatgatcctccagcgcggggatctcatgctggagttcttcgcccaccctagggggaggctaactgaaacacggaaggagacaataccggaaggaacccgcgctatgacggcaataaaaagacagaataaaacgcacggtgttgggtcgtttgttcataaacgcggggttcggtcccagggctggcactctgtcgataccccaccgagaccccattggggccaatacgcccgcgtttcttccttttccccaccccaccccccaagttcgggtgaaggcccagggctcgcagccaacgtcggggcggcaggccctgccatagcctcaggttactcatatatactttagattgatttaaaacttcatttttaatttaaaaggatctaggtgaagatcctttttgataatctcatgaccaaaatcccttaacgtgagttttcgttccactgagcgtcagaccccgtagaaaagatcaaaggatcttcttgagatcctttttttctgcgcgtaatctgctgcttgcaaacaaaaaaaccaccgctaccagcggtggtttgtttgccggatcaagagctaccaactctttttccgaaggtaactggcttcagcagagcgcagataccaaatactgttcttctagtgtagccgtagttaggccaccacttcaagaactctgtagcaccgcctacatacctcgctctgctaatcctgttaccagtggctgctgccagtggcgataagtcgtgtcttaccgggttggactcaagacgatagttaccggataaggcgcagcggtcgggctgaacggggggttcgtgcacacagcccagcttggagcgaacgacctacaccgaactgagatacctacagcgtgagctatgagaaagcgccacgcttcccgaagggagaaaggcggacaggtatccggtaagcggcagggtcggaacaggagagcgcacgagggagcttccagggggaaacgcctggtatctttatagtcctgtcgggtttcgccacctctgacttgagcgtcgatttttgtgatgctcgtcaggggggcggagcctatggaaaaacgccagcaacgcggcctttttacggttcctggccttttgctggccttttgctcacatgttctttcctgcgttatcccctgattctgtggataaccgtattaccgccatgcattagttattaatagtaatcaattacggggtcattagttcatagcccatatatggagttccgcgttacataacttacggtaaatggcccgcctggctgaccgcccaacgacccccgcccattgacgtcaataatgacgtatgttcccatagtaacgccaatagggactttccattgacgtcaatgggtggagtatttacggtaaactgcccacttggcagtacatcaa

SEQ ID NO: 72 - DNA, 5761 bp, Artificial Sequence
  Synthetic
gtgtatcatatgccaagtacgccccctattgacgtcaatgacggtaaatggcccgcctggcattatgcccagtacatgaccttatgggactttcctacttggcagtacatctacgtattagtcatcgctattaccatggtgatgcggttttggcagtacatcaatgggcgtggatagcggtttgactcacggggatttccaagtctccaccccattgacgtcaatgggagtttgttttggcaccaaaatcaacgggactttccaaaatgtcgtaacaactccgccccattgacgcaaatgggcggtaggcgtgtacggtgggaggtctatataagcagagctggtttagtgaaccgtcagatccgctagcgctaccggactcagatctcgagctcatgtgcggtagattcttgcggaggctcttggccgaagaatccaggcggtccacaccggtaggcaggctccttcttccagtcttgcttggattccgactggttcttctcgcagcaagcggtcctggcgtttacggggacgagcaatcagagttcgtatgccacacgcaacaaccgggctgtaaggcggcatgctttgacgcattccatccgctttcacctcttcggttctgggtgttccaagtcatccttgtcgctgtcccatcagcgctttatatgggattcacattgtatcacgttatttggcactgggaattgtccggaaagggtaaagaggaagaaactttgatccaaggacgcgagggaaatacagatgtccccggagccggaagtttgaggctcttgtgggcttatgtggcacagcttggcgcgagacttgtacttgaaggggctgcactgggtctccagtatcatctttacggatttcagatgccgagcagtttcgcttgtaggagggaaccatgtctcggctcaatcacttgtaacttgtcaagaccttctgagaagacaatctttctgaaaaccatgtttggagtgagtggcttttgtctgctgttcacgtttctcgagcttgtgctcctgggtctcggacggtggtggcgcacatggaaacataaatccagttcctccaaatattttctcactagtgaatccactcgaaggcataagaaggcaacggacagtcttccggttgtcgagactaaggaacagtttcaagaggcggtacccggtcggagtttggcccaggaaaaacagcgacccgtgggtcccagagacgcaggaggttcaggcggtgatccaccggtcgccaccatggcgcgtaaggtcgatctcacctcctgcgatcgcgagccgatccacatccccggcagcattcagccgtgcggctgcctgctagcctgcgacgcgcaggcggtgcggatcacgcgcattacggaaaatgccggcgcgttctttggacgcgaaactccgcgggtcggtgagctactcgccgattacttcggcgagaccgaagcccatgcgctgcgcaacgcactggcgcagtcctccgatccaaagcgaccggcgctgatcttcggttggcgcgacggcctgaccggccgcaccttcgacatctcactgcatcgccatgacggtacatcgatcatcgagttcgagcctgcggcggccgaacaggccgacaatccgctgcggctgacgcggcagatcatcgcgcgcaccaaagaactgaagtcgctcgaagagatggccgcacgggtgccgcgctatctgcaggcgatgctcggctatcaccgcgtgatgttgtaccgcttcgcggacgacggctccgggatggtgatcggcgaggcgaagcgcagcgacctcgagagctttctcggtcagcactttccggcgtcgctggtcccgcagcaggcgcggctactgtacttgaagaacgcgatccgcgtggtctcggattcgcgcggcatcagcagccggatcgtgcccgagcacgacgcctccggcgccgcgctcgatctgtcgttcgcgcacctgcgcagcatctcgccctgccatctcgaatttctgcggaacatgggcgtcagcgcctcgatgtcgctgtcgatcatcattgacggcacgctatggggattgatcatctgtcatcattacgagccgcgtgccgtgccgatggcgcagcgcgtcgcggccgaaatgttcgccgacttcttatcgctgcacttcaccgccgcccaccaccaacgctaagcggccgcgactctagatcataatcagccataccacatttgtagaggttttacttgctttaaaaaacctcccacacctccccctgaacctgaaacataaaatgaatgcaattgttgttgttaacttgtttattgcagcttataatggttacaaataaagcaatagcatcacaaatttcacaaataaagcatttttttcactgcattctagttgtggtttgtccaaactcatcaatgtatcttaaggcgtaaattgtaagcgttaatattttgttaaaattcgcgttaaatttttgttaaatcagctcattttttaaccaataggccgaaatcggcaaaatcccttataaatcaaaagaatagaccgagatagggttgagtgttgttccagtttggaacaagagtccactattaaagaacgtggactccaacgtcaaagggcgaaaaaccgtctatcagggcgatggcccactacgtgaaccatcaccctaatcaagttttttggggtcgaggtgccgtaaagcactaaatcggaaccctaaagggagcccccgatttagagcttgacggggaaagccggcgaacgtggcgagaaaggaagggaagaaagcgaaaggagcgggcgctagggcgctggcaagtgtagcggtcacgctgcgcgtaaccaccacacccgccgcgcttaatgcgccgctacagggcgcgtcaggtggcacttttcggggaaatgtgcgcggaacccctatttgtttatttttctaaatacattcaaatatgtatccgctcatgagacaataaccctgataaatgcttcaataatattgaaaaaggaagagtcctgaggcggaaagaaccagctgtggaatgtgtgtcagttagggtgtggaaagtccccaggctccccagcaggcagaagtatgcaaagcatgcatctcaattagtcagcaaccaggtgtggaaagtccccaggctccccagcaggcagaagtatgcaaagcatgcatctcaattagtcagcaaccatagtcccgcccctaactccgcccatcccgcccctaactccgcccagttccgcccattctccgccccatggctgactaattttttttatttatgcagaggccgaggccgcctcggcctctgagctattccagaagtagtgaggaggcttttttggaggcctaggcttttgcaaagatcgatcaagagacaggatgaggatcgtttcgcatgattgaacaagatggattgcacgcaggttctccggccgcttgggtggagaggctattcggctatgactgggcacaacagacaatcggctgctctgatgccgccgtgttccggctgtcagcgcaggggcgcccggttctttttgtcaagaccgacctgtccggtgccctgaatgaactgcaagacgaggcagcgcggctatcgtggctggccacgacgggcgttccttgcgcagctgtgctcgacgttgtcactgaagcgggaagggactggctgctattgggcgaagtgccggggcaggatctcctgtcatctcaccttgctcctgccgagaaagtatccatcatggctgatgcaatgcggcggctgcatacgcttgatccggctacctgcccattcgaccaccaagcgaaacatcgcatcgagcgagcacgtactcggatggaagccggtcttgtcgatcaggatgatctggacgaagagcatcaggggctcgcgccagccgaactgttcgccaggctcaaggcgagcatgcccgacggcgaggatctcgtcgtgacccatggcgatgcctgcttgccgaatatcatggtggaaaatggccgcttttctggattcatcgactgtggccggctgggtgtggcggaccgctatcaggacatagcgttggctacccgtgatattgctgaagagcttggcggcgaatgggctgaccgcttcctcgtgctttacggtatcgccgctcccgattcgcagcgcatcgccttctatcgccttcttgacgagttcttctgagcgggactctggggttcgaaatgaccgaccaagcgacgcccaacctgccatcacgagatttcgattccaccgccgccttctatgaaaggttgggcttcggaatcgttttccgggacgccggctggatgatcctccagcgcggggatctcatgctggagttcttcgcccaccctagggggaggctaactgaaacacggaaggagacaataccggaaggaacccgcgctatgacggcaataaaaagacagaataaaacgcacggtgttgggtcgtttgttcataaacgcggggttcggtcccagggctggcactctgtcgataccccaccgagaccccattggggccaatacgcccgcgtttcttccttttccccaccccaccccccaagttcgggtgaaggcccagggctcgcagccaacgtcggggcggcaggccctgccatagcctcaggttactcatatatactttagattgatttaaaacttcatttttaatttaaaaggatctaggtgaagatcctttttgataatctcatgaccaaaatcccttaacgtgagttttcgttccactgagcgtcagaccccgtagaaaagatcaaaggatcttcttgagatcctttttttctgcgcgtaatctgctgcttgcaaacaaaaaaaccaccgctaccagcggtggtttgtttgccggatcaagagctaccaactctttttccgaaggtaactggcttcagcagagcgcagataccaaatactgttcttctagtgtagccgtagttaggccaccacttcaagaactctgtagcaccgcctacatacctcgctctgctaatcctgttaccagtggctgctgccagtggcgataagtcgtgtcttaccgggttggactcaagacgatagttaccggataaggcgcagcggtcgggctgaacggggggttcgtgcacacagcccagcttggagcgaacgacctacaccgaactgagatacctacagcgtgagctatgagaaagcgccacgcttcccgaagggagaaaggcggacaggtatccggtaagcggcagggtcggaacaggagagcgcacgagggagcttccagggggaaacgcctggtatctttatagtcctgtcgggtttcgccacctctgacttgagcgtcgatttttgtgatgctcgtcaggggggcggagcctatggaaaaacgccagcaacgcggcctttttacggttcctggccttttgctggccttttgctcacatgttctttcctgcgttatcccctgattctgtggataaccgtattaccgccatgcattagttattaatagtaatcaattacggggtcattagttcatagcccatatatggagttccgcgttacataacttacggtaaatggcccgcctggctgaccgcccaacgacccccgcccattgacgtcaataatgacgtatgttcccatagtaacgccaatagggactttccattgacgtcaatgggtggagtatttacggtaaactgcccacttggcagtacatcaa

SEQ ID NO: 73 - DNA, 5806 bp, Artificial Sequence
  Synthetic
gtgtatcatatgccaagtacgccccctattgacgtcaatgacggtaaatggcccgcctggcattatgcccagtacatgaccttatgggactttcctacttggcagtacatctacgtattagtcatcgctattaccatggtgatgcggttttggcagtacatcaatgggcgtggatagcggtttgactcacggggatttccaagtctccaccccattgacgtcaatgggagtttgttttggcaccaaaatcaacgggactttccaaaatgtcgtaacaactccgccccattgacgcaaatgggcggtaggcgtgtacggtgggaggtctatataagcagagctggtttagtgaaccgtcagatccgctagcgctaccggactcagatctcgagctcatgggcgaatgggctttcctcggcagccttcttgatgcggttcagcttcagtctccccttgttggacggctgtggttggtagtcatgcttatcttcagaatcttggtacttgccacggtgggaggagctgtcttcgaggatgaacaagaggaatttgtatgcaatacgctccaacccgggtgtcgacaaacatgttatgatcgcgccttcccggtgtctcactatagattctggctttttcacatccttctgctgtctgctccgcctgttctcttcgtagtctactctatgcaccgagcaggaaaagaagccggaggagccgaagcagcagcgcagtgtgcacctggacttcctgaggctcagtgtgccccttgtgcgctcagggcacgaagggccaggcggtgctacttgttgagtgttgccttgcggcttcttgccgagctgacgttcttgggaggtcaagctttgttgtacggctttagagtagccccacactttgcctgcgcaggcccaccttgtccacacactgtcgactgttttgtttcccggcctacagaaaagactgtgttcgttttgttttactttgccgtcggtttgcttagtgcactcttgtcagtcgcagagctcggtcacctcctctggaaagggcggccgagggctggggagagggacaaccgatgtaaccgagcgcacgaggaagcgcagaaacttttgccgccccctccccctcctccgcctccccctgctcttccatcacgcaggcctgggcctgaaccttgtgcacctcctgcatatgcccacccagccccggcgtcactgagagaatgtggcagcggaagaggtaaggccagccccgctactgggcggcgggatcttgctatcggaggttcaggcggtgatccaccggtcgccaccatggcgcgtaaggtcgatctcacctcctgcgatcgcgagccgatccacatccccggcagcattcagccgtgcggctgcctgctagcctgcgacgcgcaggcggtgcggatcacgcgcattacggaaaatgccggcgcgttctttggacgcgaaactccgcgggtcggtgagctactcgccgattacttcggcgagaccgaagcccatgcgctgcgcaacgcactggcgcagtcctccgatccaaagcgaccggcgctgatcttcggttggcgcgacggcctgaccggccgcaccttcgacatctcactgcatcgccatgacggtacatcgatcatcgagttcgagcctgcggcggccgaacaggccgacaatccgctgcggctgacgcggcagatcatcgcgcgcaccaaagaactgaagtcgctcgaagagatggccgcacgggtgccgcgctatctgcaggcgatgctcggctatcaccgcgtgatgttgtaccgcttcgcggacgacggctccgggatggtgatcggcgaggcgaagcgcagcgacctcgagagctttctcggtcagcactttccggcgtcgctggtcccgcagcaggcgcggctactgtacttgaagaacgcgatccgcgtggtctcggattcgcgcggcatcagcagccggatcgtgcccgagcacgacgcctccggcgccgcgctcgatctgtcgttcgcgcacctgcgcagcatctcgccctgccatctcgaatttctgcggaacatgggcgtcagcgcctcgatgtcgctgtcgatcatcattgacggcacgctatggggattgatcatctgtcatcattacgagccgcgtgccgtgccgatggcgcagcgcgtcgcggccgaaatgttcgccgacttcttatcgctgcacttcaccgccgcccaccaccaacgctaagcggccgcgactctagatcataatcagccataccacatttgtagaggttttacttgctttaaaaaacctcccacacctccccctgaacctgaaacataaaatgaatgcaattgttgttgttaacttgtttattgcagcttataatggttacaaataaagcaatagcatcacaaatttcacaaataaagcatttttttcactgcattctagttgtggtttgtccaaactcatcaatgtatcttaaggcgtaaattgtaagcgttaatattttgttaaaattcgcgttaaatttttgttaaatcagctcattttttaaccaataggccgaaatcggcaaaatcccttataaatcaaaagaatagaccgagatagggttgagtgttgttccagtttggaacaagagtccactattaaagaacgtggactccaacgtcaaagggcgaaaaaccgtctatcagggcgatggcccactacgtgaaccatcaccctaatcaagttttttggggtcgaggtgccgtaaagcactaaatcggaaccctaaagggagcccccgatttagagcttgacggggaaagccggcgaacgtggcgagaaaggaagggaagaaagcgaaaggagcgggcgctagggcgctggcaagtgtagcggtcacgctgcgcgtaaccaccacacccgccgcgcttaatgcgccgctacagggcgcgtcaggtggcacttttcggggaaatgtgcgcggaacccctatttgtttatttttctaaatacattcaaatatgtatccgctcatgagacaataaccctgataaatgcttcaataatattgaaaaaggaagagtcctgaggcggaaagaaccagctgtggaatgtgtgtcagttagggtgtggaaagtccccaggctccccagcaggcagaagtatgcaaagcatgcatctcaattagtcagcaaccaggtgtggaaagtccccaggctccccagcaggcagaagtatgcaaagcatgcatctcaattagtcagcaaccatagtcccgcccctaactccgcccatcccgcccctaactccgcccagttccgcccattctccgccccatggctgactaattttttttatttatgcagaggccgaggccgcctcggcctctgagctattccagaagtagtgaggaggcttttttggaggcctaggcttttgcaaagatcgatcaagagacaggatgaggatcgtttcgcatgattgaacaagatggattgcacgcaggttctccggccgcttgggtggagaggctattcggctatgactgggcacaacagacaatcggctgctctgatgccgccgtgttccggctgtcagcgcaggggcgcccggttctttttgtcaagaccgacctgtccggtgccctgaatgaactgcaagacgaggcagcgcggctatcgtggctggccacgacgggcgttccttgcgcagctgtgctcgacgttgtcactgaagcgggaagggactggctgctattgggcgaagtgccggggcaggatctcctgtcatctcaccttgctcctgccgagaaagtatccatcatggctgatgcaatgcggcggctgcatacgcttgatccggctacctgcccattcgaccaccaagcgaaacatcgcatcgagcgagcacgtactcggatggaagccggtcttgtcgatcaggatgatctggacgaagagcatcaggggctcgcgccagccgaactgttcgccaggctcaaggcgagcatgcccgacggcgaggatctcgtcgtgacccatggcgatgcctgcttgccgaatatcatggtggaaaatggccgcttttctggattcatcgactgtggccggctgggtgtggcggaccgctatcaggacatagcgttggctacccgtgatattgctgaagagcttggcggcgaatgggctgaccgcttcctcgtgctttacggtatcgccgctcccgattcgcagcgcatcgccttctatcgccttcttgacgagttcttctgagcgggactctggggttcgaaatgaccgaccaagcgacgcccaacctgccatcacgagatttcgattccaccgccgccttctatgaaaggttgggcttcggaatcgttttccgggacgccggctggatgatcctccagcgcggggatctcatgctggagttcttcgcccaccctagggggaggctaactgaaacacggaaggagacaataccggaaggaacccgcgctatgacggcaataaaaagacagaataaaacgcacggtgttgggtcgtttgttcataaacgcggggttcggtcccagggctggcactctgtcgataccccaccgagaccccattggggccaatacgcccgcgtttcttccttttccccaccccaccccccaagttcgggtgaaggcccagggctcgcagccaacgtcggggcggcaggccctgccatagcctcaggttactcatatatactttagattgatttaaaacttcatttttaatttaaaaggatctaggtgaagatcctttttgataatctcatgaccaaaatcccttaacgtgagttttcgttccactgagcgtcagaccccgtagaaaagatcaaaggatcttcttgagatcctttttttctgcgcgtaatctgctgcttgcaaacaaaaaaaccaccgctaccagcggtggtttgtttgccggatcaagagctaccaactctttttccgaaggtaactggcttcagcagagcgcagataccaaatactgttcttctagtgtagccgtagttaggccaccacttcaagaactctgtagcaccgcctacatacctcgctctgctaatcctgttaccagtggctgctgccagtggcgataagtcgtgtcttaccgggttggactcaagacgatagttaccggataaggcgcagcggtcgggctgaacggggggttcgtgcacacagcccagcttggagcgaacgacctacaccgaactgagatacctacagcgtgagctatgagaaagcgccacgcttcccgaagggagaaaggcggacaggtatccggtaagcggcagggtcggaacaggagagcgcacgagggagcttccagggggaaacgcctggtatctttatagtcctgtcgggtttcgccacctctgacttgagcgtcgatttttgtgatgctcgtcaggggggcggagcctatggaaaaacgccagcaacgcggcctttttacggttcctggccttttgctggccttttgctcacatgttctttcctgcgttatcccctgattctgtggataaccgtattaccgccatgcattagttattaatagtaatcaattacggggtcattagttcatagcccatatatggagttccgcgttacataacttacggtaaatggcccgcctggctgaccgcccaacgacccccgcccattgacgtcaataatgacgtatgttcccatagtaacgccaatagggactttccattgacgtcaatgggtggagtatttacggtaaactgcccacttggcagtacatcaa

SEQ ID NO: 74 - DNA, 5749 bp, Artificial Sequence
  Synthetic
atatatggagttccgcgttacataacttacggtaaatggcccgcctggctgaccgcccaacgacccccgcccattgacgtcaataatgacgtatgttcccatagtaacgccaatagggactttccattgacgtcaatgggtggagtatttacggtaaactgcccacttggcagtacatcaagtgtatcatatgccaagtacgccccctattgacgtcaatgacggtaaatggcccgcctggcattatgcccagtacatgaccttatgggactttcctacttggcagtacatctacgtattagtcatcgctattaccatggtgatgcggttttggcagtacatcaatgggcgtggatagcggtttgactcacggggatttccaagtctccaccccattgacgtcaatgggagtttgttttggcaccaaaatcaacgggactttccaaaatgtcgtaacaactccgccccattgacgcaaatgggcggtaggcgtgtacggtgggaggtctatataagcagagctggtttagtgaaccgtcagatccgctagcgctaccggactcagatcatgaactggacaggactttacactctgttgtcaggagtaaataggcactcaactgcgatagggcgggtctggcttagtgtgattttcatatttcggattatggttcttgttgttgcggcagaaagcgtatggggggacgaaaaatcatctttcatctgcaataccttgcaacctggatgcaattcagtctgctacgaccaattcttccctatatcccatgtcaggctctggtctctgcaactcatccttgtttcaacacccgcgttgcttgtggctatgcatgtagcccatcaacaacacattgagaaaaagatgcttcggcttgaagggcacggcgacccgcttcatcttgaagaagttaaaagacacaaggtccatatcagcgggaccctttggtggacttatgtgatctcagtagttttcaggctgctgtttgaagccgtgtttatgtacgttttttacttgctctatccggggtacgcgatggtcaggcttgtaaagtgtgatgtatacccttgtcccaacactgtagactgctttgttagtcggcccaccgagaagacggtgtttaccgtctttatgcttgcagcgagtggaatctgtattatcttgaacgtagcggaagttgtatatctcataatccgggcgtgtgccaggcgcgctcagcggcggtcaaatcctccgagccgcaaaggcagcggcttcggccatcgcctgtcccctgaatacaagcaaaatgaaataaacaagcttttgtctgaacaagacggtagtctgaaggacatattgcgaaggtctcctgggaccggagccggcctggccgagaaatccgaccggtgttccgcatgtgatccaccggtcgccaccatggcgcgtaaggtcgatctcacctcctgcgatcgcgagccgatccacatccccggcagcattcagccgtgcggctgcctgctagcctgcgacgcgcaggcggtgcggatcacgcgcattacggaaaatgccggcgcgttctttggacgcgaaactccgcgggtcggtgagctactcgccgattacttcggcgagaccgaagcccatgcgctgcgcaacgcactggcgcagtcctccgatccaaagcgaccggcgctgatcttcggttggcgcgacggcctgaccggccgcaccttcgacatctcactgcatcgccatgacggtacatcgatcatcgagttcgagcctgcggcggccgaacaggccgacaatccgctgcggctgacgcggcagatcatcgcgcgcaccaaagaactgaagtcgctcgaagagatggccgcacgggtgccgcgctatctgcaggcgatgctcggctatcaccgcgtgatgttgtaccgcttcgcggacgacggctccgggatggtgatcggcgaggcgaagcgcagcgacctcgagagctttctcggtcagcactttccggcgtcgctggtcccgcagcaggcgcggctactgtacttgaagaacgcgatccgcgtggtctcggattcgcgcggcatcagcagccggatcgtgcccgagcacgacgcctccggcgccgcgctcgatctgtcgttcgcgcacctgcgcagcatctcgccctgccatctcgaatttctgcggaacatgggcgtcagcgcctcgatgtcgctgtcgatcatcattgacggcacgctatggggattgatcatctgtcatcattacgagccgcgtgccgtgccgatggcgcagcgcgtcgcggccgaaatgttcgccgacttcttatcgctgcacttcaccgccgcccaccaccaacgctagcggccgcgactctagatcataatcagccataccacatttgtagaggttttacttgctttaaaaaacctcccacacctccccctgaacctgaaacataaaatgaatgcaattgttgttgttaacttgtttattgcagcttataatggttacaaataaagcaatagcatcacaaatttcacaaataaagcatttttttcactgcattctagttgtggtttgtccaaactcatcaatgtatcttaaggcgtaaattgtaagcgttaatattttgttaaaattcgcgttaaatttttgttaaatcagctcattttttaaccaataggccgaaatcggcaaaatcccttataaatcaaaagaatagaccgagatagggttgagtgttgttccagtttggaacaagagtccactattaaagaacgtggactccaacgtcaaagggcgaaaaaccgtctatcagggcgatggcccactacgtgaaccatcaccctaatcaagttttttggggtcgaggtgccgtaaagcactaaatcggaaccctaaagggagcccccgatttagagcttgacggggaaagccggcgaacgtggcgagaaaggaagggaagaaagcgaaaggagcgggcgctagggcgctggcaagtgtagcggtcacgctgcgcgtaaccaccacacccgccgcgcttaatgcgccgctacagggcgcgtcaggtggcacttttcggggaaatgtgcgcggaacccctatttgtttatttttctaaatacattcaaatatgtatccgctcatgagacaataaccctgataaatgcttcaataatattgaaaaaggaagagtcctgaggcggaaagaaccagctgtggaatgtgtgtcagttagggtgtggaaagtccccaggctccccagcaggcagaagtatgcaaagcatgcatctcaattagtcagcaaccaggtgtggaaagtccccaggctccccagcaggcagaagtatgcaaagcatgcatctcaattagtcagcaaccatagtcccgcccctaactccgcccatcccgcccctaactccgcccagttccgcccattctccgccccatggctgactaattttttttatttatgcagaggccgaggccgcctcggcctctgagctattccagaagtagtgaggaggcttttttggaggcctaggcttttgcaaagatcgatcaagagacaggatgaggatcgtttcgcatgattgaacaagatggattgcacgcaggttctccggccgcttgggtggagaggctattcggctatgactgggcacaacagacaatcggctgctctgatgccgccgtgttccggctgtcagcgcaggggcgcccggttctttttgtcaagaccgacctgtccggtgccctgaatgaactgcaagacgaggcagcgcggctatcgtggctggccacgacgggcgttccttgcgcagctgtgctcgacgttgtcactgaagcgggaagggactggctgctattgggcgaagtgccggggcaggatctcctgtcatctcaccttgctcctgccgagaaagtatccatcatggctgatgcaatgcggcggctgcatacgcttgatccggctacctgcccattcgaccaccaagcgaaacatcgcatcgagcgagcacgtactcggatggaagccggtcttgtcgatcaggatgatctggacgaagagcatcaggggctcgcgccagccgaactgttcgccaggctcaaggcgagcatgcccgacggcgaggatctcgtcgtgacccatggcgatgcctgcttgccgaatatcatggtggaaaatggccgcttttctggattcatcgactgtggccggctgggtgtggcggaccgctatcaggacatagcgttggctacccgtgatattgctgaagagcttggcggcgaatgggctgaccgcttcctcgtgctttacggtatcgccgctcccgattcgcagcgcatcgccttctatcgccttcttgacgagttcttctgagcgggactctggggttcgaaatgaccgaccaagcgacgcccaacctgccatcacgagatttcgattccaccgccgccttctatgaaaggttgggcttcggaatcgttttccgggacgccggctggatgatcctccagcgcggggatctcatgctggagttcttcgcccaccctagggggaggctaactgaaacacggaaggagacaataccggaaggaacccgcgctatgacggcaataaaaagacagaataaaacgcacggtgttgggtcgtttgttcataaacgcggggttcggtcccagggctggcactctgtcgataccccaccgagaccccattggggccaatacgcccgcgtttcttccttttccccaccccaccccccaagttcgggtgaaggcccagggctcgcagccaacgtcggggcggcaggccctgccatagcctcaggttactcatatatactttagattgatttaaaacttcatttttaatttaaaaggatctaggtgaagatcctttttgataatctcatgaccaaaatcccttaacgtgagttttcgttccactgagcgtcagaccccgtagaaaagatcaaaggatcttcttgagatcctttttttctgcgcgtaatctgctgcttgcaaacaaaaaaaccaccgctaccagcggtggtttgtttgccggatcaagagctaccaactctttttccgaaggtaactggcttcagcagagcgcagataccaaatactgttcttctagtgtagccgtagttaggccaccacttcaagaactctgtagcaccgcctacatacctcgctctgctaatcctgttaccagtggctgctgccagtggcgataagtcgtgtcttaccgggttggactcaagacgatagttaccggataaggcgcagcggtcgggctgaacggggggttcgtgcacacagcccagcttggagcgaacgacctacaccgaactgagatacctacagcgtgagctatgagaaagcgccacgcttcccgaagggagaaaggcggacaggtatccggtaagcggcagggtcggaacaggagagcgcacgagggagcttccagggggaaacgcctggtatctttatagtcctgtcgggtttcgccacctctgacttgagcgtcgatttttgtgatgctcgtcaggggggcggagcctatggaaaaacgccagcaacgcggcctttttacggttcctggccttttgctggccttttgctcacatgttctttcctgcgttatcccctgattctgtggataaccgtattaccgccatgcattagttattaatagtaatcaattacggggtcattagttcatagccc

SEQ ID NO: 75 - DNA, 5870 bp, Artificial Sequence
  Synthetic
atatatggagttccgcgttacataacttacggtaaatggcccgcctggctgaccgcccaacgacccccgcccattgacgtcaataatgacgtatgttcccatagtaacgccaatagggactttccattgacgtcaatgggtggagtatttacggtaaactgcccacttggcagtacatcaagtgtatcatatgccaagtacgccccctattgacgtcaatgacggtaaatggcccgcctggcattatgcccagtacatgaccttatgggactttcctacttggcagtacatctacgtattagtcatcgctattaccatggtgatgcggttttggcagtacatcaatgggcgtggatagcggtttgactcacggggatttccaagtctccaccccattgacgtcaatgggagtttgttttggcaccaaaatcaacgggactttccaaaatgtcgtaacaactccgccccattgacgcaaatgggcggtaggcgtgtacggtgggaggtctatataagcagagctggtttagtgaaccgtcagatccgctagcgctaccggactcagatctcgagctatgggagaatggacgatactcgagaggttgttggaggcagcagtgcaacagcactctacaatgatcggtcgcatactgctcacggttgtggtgatatttaggatcttgatcgtcgccatcgtcggtgagacagtatatgacgatgaacaaaccatgttcgtgtgtaatacacttcaaccagggtgcaatcaggcatgttacgaccgcgcatttcccatctcccacatacgctattgggtatttcagatcataatggtatgtactccttccctgtgctttatcacttattccgtgcatcaatccgcgaagcagcgagaaagacgctacagtaccgtatttcttgcgctggaccgagacccacccgaaagcattggggggcctggtgggaccgggggagggggttctggcggtggtaaacgagaagataaaaagctgcagaacgcgattgttaacggagtactgcaaaatacggaaaatacatctaaggagacggagccagactgcctcgaagtgaaagaactcacgcctcacccatccggactccgcacagcctcaaagtcaaaactgcgaagacaggaggggatttcacgcttttatattatccaggttgttttccgaaacgctctcgagattggctttctcgtgggtcaatacttcctgtatgggttttctgttcccggactctatgagtgtaaccgctatccctgcatcaaagaagtagaatgctacgtatccagacctacggaaaaaaccgtttttcttgtctttatgttcgccgtgtcaggcatttgcgttgtgctcaatctggccgaactgaaccacctggggtggcgaaagattaaactcgcggtccgaggcgcacaagctaaacggaagtctatttacgaaatacgcaacaaggatctcccgcgggtaagcgtgcctaattttggccggacgcaatcctccgactccgcttatgttgatccaccggtcgccaccatggcgcgtaaggtcgatctcacctcctgcgatcgcgagccgatccacatccccggcagcattcagccgtgcggctgcctgctagcctgcgacgcgcaggcggtgcggatcacgcgcattacggaaaatgccggcgcgttctttggacgcgaaactccgcgggtcggtgagctactcgccgattacttcggcgagaccgaagcccatgcgctgcgcaacgcactggcgcagtcctccgatccaaagcgaccggcgctgatcttcggttggcgcgacggcctgaccggccgcaccttcgacatctcactgcatcgccatgacggtacatcgatcatcgagttcgagcctgcggcggccgaacaggccgacaatccgctgcggctgacgcggcagatcatcgcgcgcaccaaagaactgaagtcgctcgaagagatggccgcacgggtgccgcgctatctgcaggcgatgctcggctatcaccgcgtgatgttgtaccgcttcgcggacgacggctccgggatggtgatcggcgaggcgaagcgcagcgacctcgagagctttctcggtcagcactttccggcgtcgctggtcccgcagcaggcgcggctactgtacttgaagaacgcgatccgcgtggtctcggattcgcgcggcatcagcagccggatcgtgcccgagcacgacgcctccggcgccgcgctcgatctgtcgttcgcgcacctgcgcagcatctcgccctgccatctcgaatttctgcggaacatgggcgtcagcgcctcgatgtcgctgtcgatcatcattgacggcacgctatggggattgatcatctgtcatcattacgagccgcgtgccgtgccgatggcgcagcgcgtcgcggccgaaatgttcgccgacttcttatcgctgcacttcaccgccgcccaccaccaacgctagcggccgcgactctagatcataatcagccataccacatttgtagaggttttacttgctttaaaaaacctcccacacctccccctgaacctgaaacataaaatgaatgcaattgttgttgttaacttgtttattgcagcttataatggttacaaataaagcaatagcatcacaaatttcacaaataaagcatttttttcactgcattctagttgtggtttgtccaaactcatcaatgtatcttaaggcgtaaattgtaagcgttaatattttgttaaaattcgcgttaaatttttgttaaatcagctcattttttaaccaataggccgaaatcggcaaaatcccttataaatcaaaagaatagaccgagatagggttgagtgttgttccagtttggaacaagagtccactattaaagaacgtggactccaacgtcaaagggcgaaaaaccgtctatcagggcgatggcccactacgtgaaccatcaccctaatcaagttttttggggtcgaggtgccgtaaagcactaaatcggaaccctaaagggagcccccgatttagagcttgacggggaaagccggcgaacgtggcgagaaaggaagggaagaaagcgaaaggagcgggcgctagggcgctggcaagtgtagcggtcacgctgcgcgtaaccaccacacccgccgcgcttaatgcgccgctacagggcgcgtcaggtggcacttttcggggaaatgtgcgcggaacccctatttgtttatttttctaaatacattcaaatatgtatccgctcatgagacaataaccctgataaatgcttcaataatattgaaaaaggaagagtcctgaggcggaaagaaccagctgtggaatgtgtgtcagttagggtgtggaaagtccccaggctccccagcaggcagaagtatgcaaagcatgcatctcaattagtcagcaaccaggtgtggaaagtccccaggctccccagcaggcagaagtatgcaaagcatgcatctcaattagtcagcaaccatagtcccgcccctaactccgcccatcccgcccctaactccgcccagttccgcccattctccgccccatggctgactaattttttttatttatgcagaggccgaggccgcctcggcctctgagctattccagaagtagtgaggaggcttttttggaggcctaggcttttgcaaagatcgatcaagagacaggatgaggatcgtttcgcatgattgaacaagatggattgcacgcaggttctccggccgcttgggtggagaggctattcggctatgactgggcacaacagacaatcggctgctctgatgccgccgtgttccggctgtcagcgcaggggcgcccggttctttttgtcaagaccgacctgtccggtgccctgaatgaactgcaagacgaggcagcgcggctatcgtggctggccacgacgggcgttccttgcgcagctgtgctcgacgttgtcactgaagcgggaagggactggctgctattgggcgaagtgccggggcaggatctcctgtcatctcaccttgctcctgccgagaaagtatccatcatggctgatgcaatgcggcggctgcatacgcttgatccggctacctgcccattcgaccaccaagcgaaacatcgcatcgagcgagcacgtactcggatggaagccggtcttgtcgatcaggatgatctggacgaagagcatcaggggctcgcgccagccgaactgttcgccaggctcaaggcgagcatgcccgacggcgaggatctcgtcgtgacccatggcgatgcctgcttgccgaatatcatggtggaaaatggccgcttttctggattcatcgactgtggccggctgggtgtggcggaccgctatcaggacatagcgttggctacccgtgatattgctgaagagcttggcggcgaatgggctgaccgcttcctcgtgctttacggtatcgccgctcccgattcgcagcgcatcgccttctatcgccttcttgacgagttcttctgagcgggactctggggttcgaaatgaccgaccaagcgacgcccaacctgccatcacgagatttcgattccaccgccgccttctatgaaaggttgggcttcggaatcgttttccgggacgccggctggatgatcctccagcgcggggatctcatgctggagttcttcgcccaccctagggggaggctaactgaaacacggaaggagacaataccggaaggaacccgcgctatgacggcaataaaaagacagaataaaacgcacggtgttgggtcgtttgttcataaacgcggggttcggtcccagggctggcactctgtcgataccccaccgagaccccattggggccaatacgcccgcgtttcttccttttccccaccccaccccccaagttcgggtgaaggcccagggctcgcagccaacgtcggggcggcaggccctgccatagcctcaggttactcatatatactttagattgatttaaaacttcatttttaatttaaaaggatctaggtgaagatcctttttgataatctcatgaccaaaatcccttaacgtgagttttcgttccactgagcgtcagaccccgtagaaaagatcaaaggatcttcttgagatcctttttttctgcgcgtaatctgctgcttgcaaacaaaaaaaccaccgctaccagcggtggtttgtttgccggatcaagagctaccaactctttttccgaaggtaactggcttcagcagagcgcagataccaaatactgttcttctagtgtagccgtagttaggccaccacttcaagaactctgtagcaccgcctacatacctcgctctgctaatcctgttaccagtggctgctgccagtggcgataagtcgtgtcttaccgggttggactcaagacgatagttaccggataaggcgcagcggtcgggctgaacggggggttcgtgcacacagcccagcttggagcgaacgacctacaccgaactgagatacctacagcgtgagctatgagaaagcgccacgcttcccgaagggagaaaggcggacaggtatccggtaagcggcagggtcggaacaggagagcgcacgagggagcttccagggggaaacgcctggtatctttatagtcctgtcgggtttcgccacctctgacttgagcgtcgatttttgtgatgctcgtcaggggggcggagcctatggaaaaacgccagcaacgcggcctttttacggttcctggccttttgctggccttttgctcacatgttctttcctgcgttatcccctgattctgtggataaccgtattaccgccatgcattagttattaatagtaatcaattacggggtcattagttcatagccc

SEQ ID NO: 76 - DNA, 5908 bp, Artificial Sequence
  Synthetic
gtgtatcatatgccaagtacgccccctattgacgtcaatgacggtaaatggcccgcctggcattatgcccagtacatgaccttatgggactttcctacttggcagtacatctacgtattagtcatcgctattaccatggtgatgcggttttggcagtacatcaatgggcgtggatagcggtttgactcacggggatttccaagtctccaccccattgacgtcaatgggagtttgttttggcaccaaaatcaacgggactttccaaaatgtcgtaacaactccgccccattgacgcaaatgggcggtaggcgtgtacggtgggaggtctatataagcagagctggtttagtgaaccgtcagatccgctagcgctaccggactcagatctcgagctcatgggggactggggcttcctggagaaactcctggaccaggtacaagaacacagtacagtggtgggtaagatctggctgactgtactttttatttttaggatcttgatacttggacttgcgggagaatccgtttggggggacgaacaaagtgacttcgagtgtaatacagcccagcccggctgtaccaatgtttgttatgatcaggcttttccaataagccatataaggtactgggtccttcaatttctctttgttagcaccccaaccctggtttatctggggcacgtgatctatctttcccgaagagaggaaaggctcaggcaaaaagaaggtgagttgagggcacttccggcaaaagatccacaggtggagcgggcgttggctgctgttgaacgccaaatggcgaagatatcagttgctgaagacggtcgcctcagaatccgaggcgctctcatggggacctatgttgcgagcgtgctctgtaaatctgtgttggaggcagggttcctgtacggccaatggagactgtacgggtggacaatggaacctgtgttcgtctgccaaagggctccttgtccatacttggtagattgttttgtctctcggccaacggagaagacgatcttcattatcttcatgttggtagtagggctcatatcccttgtactcaatttgctcgaattggtgcacctgttgtgtcggtgtctgtcccgggggatgagggcccgccaaggccaggacgcgccaccaacacagggtacttcctcagacccatacacggatcaggtatttttctatcttccggtagggcaaggtccatcaagcccgccctgtccgacttacaatggcctcagttcatcagaacagaactgggcgaaccttactacggaggaaaggctggcctctagccgaccccctttgttcttggaccctccgccacagaatggtcagaagccgccaagcagaccgtctagtagtgcaagtaaaaagcaatacgtggatccaccggtcgccaccatggcgcgtaaggtcgatctcacctcctgcgatcgcgagccgatccacatccccggcagcattcagccgtgcggctgcctgctagcctgcgacgcgcaggcggtgcggatcacgcgcattacggaaaatgccggcgcgttctttggacgcgaaactccgcgggtcggtgagctactcgccgattacttcggcgagaccgaagcccatgcgctgcgcaacgcactggcgcagtcctccgatccaaagcgaccggcgctgatcttcggttggcgcgacggcctgaccggccgcaccttcgacatctcactgcatcgccatgacggtacatcgatcatcgagttcgagcctgcggcggccgaacaggccgacaatccgctgcggctgacgcggcagatcatcgcgcgcaccaaagaactgaagtcgctcgaagagatggccgcacgggtgccgcgctatctgcaggcgatgctcggctatcaccgcgtgatgttgtaccgcttcgcggacgacggctccgggatggtgatcggcgaggcgaagcgcagcgacctcgagagctttctcggtcagcactttccggcgtcgctggtcccgcagcaggcgcggctactgtacttgaagaacgcgatccgcgtggtctcggattcgcgcggcatcagcagccggatcgtgcccgagcacgacgcctccggcgccgcgctcgatctgtcgttcgcgcacctgcgcagcatctcgccctgccatctcgaatttctgcggaacatgggcgtcagcgcctcgatgtcgctgtcgatcatcattgacggcacgctatggggattgatcatctgtcatcattacgagccgcgtgccgtgccgatggcgcagcgcgtcgcggccgaaatgttcgccgacttcttatcgctgcacttcaccgccgcccaccaccaacgctaagcggccgcgactctagatcataatcagccataccacatttgtagaggttttacttgctttaaaaaacctcccacacctccccctgaacctgaaacataaaatgaatgcaattgttgttgttaacttgtttattgcagcttataatggttacaaataaagcaatagcatcacaaatttcacaaataaagcatttttttcactgcattctagttgtggtttgtccaaactcatcaatgtatcttaaggcgtaaattgtaagcgttaatattttgttaaaattcgcgttaaatttttgttaaatcagctcattttttaaccaataggccgaaatcggcaaaatcccttataaatcaaaagaatagaccgagatagggttgagtgttgttccagtttggaacaagagtccactattaaagaacgtggactccaacgtcaaagggcgaaaaaccgtctatcagggcgatggcccactacgtgaaccatcaccctaatcaagttttttggggtcgaggtgccgtaaagcactaaatcggaaccctaaagggagcccccgatttagagcttgacggggaaagccggcgaacgtggcgagaaaggaagggaagaaagcgaaaggagcgggcgctagggcgctggcaagtgtagcggtcacgctgcgcgtaaccaccacacccgccgcgcttaatgcgccgctacagggcgcgtcaggtggcacttttcggggaaatgtgcgcggaacccctatttgtttatttttctaaatacattcaaatatgtatccgctcatgagacaataaccctgataaatgcttcaataatattgaaaaaggaagagtcctgaggcggaaagaaccagctgtggaatgtgtgtcagttagggtgtggaaagtccccaggctccccagcaggcagaagtatgcaaagcatgcatctcaattagtcagcaaccaggtgtggaaagtccccaggctccccagcaggcagaagtatgcaaagcatgcatctcaattagtcagcaaccatagtcccgcccctaactccgcccatcccgcccctaactccgcccagttccgcccattctccgccccatggctgactaattttttttatttatgcagaggccgaggccgcctcggcctctgagctattccagaagtagtgaggaggcttttttggaggcctaggcttttgcaaagatcgatcaagagacaggatgaggatcgtttcgcatgattgaacaagatggattgcacgcaggttctccggccgcttgggtggagaggctattcggctatgactgggcacaacagacaatcggctgctctgatgccgccgtgttccggctgtcagcgcaggggcgcccggttctttttgtcaagaccgacctgtccggtgccctgaatgaactgcaagacgaggcagcgcggctatcgtggctggccacgacgggcgttccttgcgcagctgtgctcgacgttgtcactgaagcgggaagggactggctgctattgggcgaagtgccggggcaggatctcctgtcatctcaccttgctcctgccgagaaagtatccatcatggctgatgcaatgcggcggctgcatacgcttgatccggctacctgcccattcgaccaccaagcgaaacatcgcatcgagcgagcacgtactcggatggaagccggtcttgtcgatcaggatgatctggacgaagagcatcaggggctcgcgccagccgaactgttcgccaggctcaaggcgagcatgcccgacggcgaggatctcgtcgtgacccatggcgatgcctgcttgccgaatatcatggtggaaaatggccgcttttctggattcatcgactgtggccggctgggtgtggcggaccgctatcaggacatagcgttggctacccgtgatattgctgaagagcttggcggcgaatgggctgaccgcttcctcgtgctttacggtatcgccgctcccgattcgcagcgcatcgccttctatcgccttcttgacgagttcttctgagcgggactctggggttcgaaatgaccgaccaagcgacgcccaacctgccatcacgagatttcgattccaccgccgccttctatgaaaggttgggcttcggaatcgttttccgggacgccggctggatgatcctccagcgcggggatctcatgctggagttcttcgcccaccctagggggaggctaactgaaacacggaaggagacaataccggaaggaacccgcgctatgacggcaataaaaagacagaataaaacgcacggtgttgggtcgtttgttcataaacgcggggttcggtcccagggctggcactctgtcgataccccaccgagaccccattggggccaatacgcccgcgtttcttccttttccccaccccaccccccaagttcgggtgaaggcccagggctcgcagccaacgtcggggcggcaggccctgccatagcctcaggttactcatatatactttagattgatttaaaacttcatttttaatttaaaaggatctaggtgaagatcctttttgataatctcatgaccaaaatcccttaacgtgagttttcgttccactgagcgtcagaccccgtagaaaagatcaaaggatcttcttgagatcctttttttctgcgcgtaatctgctgcttgcaaacaaaaaaaccaccgctaccagcggtggtttgtttgccggatcaagagctaccaactctttttccgaaggtaactggcttcagcagagcgcagataccaaatactgttcttctagtgtagccgtagttaggccaccacttcaagaactctgtagcaccgcctacatacctcgctctgctaatcctgttaccagtggctgctgccagtggcgataagtcgtgtcttaccgggttggactcaagacgatagttaccggataaggcgcagcggtcgggctgaacggggggttcgtgcacacagcccagcttggagcgaacgacctacaccgaactgagatacctacagcgtgagctatgagaaagcgccacgcttcccgaagggagaaaggcggacaggtatccggtaagcggcagggtcggaacaggagagcgcacgagggagcttccagggggaaacgcctggtatctttatagtcctgtcgggtttcgccacctctgacttgagcgtcgatttttgtgatgctcgtcaggggggcggagcctatggaaaaacgccagcaacgcggcctttttacggttcctggccttttgctggccttttgctcacatgttctttcctgcgttatcccctgattctgtggataaccgtattaccgccatgcattagttattaatagtaatcaattacggggtcattagttcatagcccatatatggagttccgcgttacataacttacggtaaatggcccgcctggctgaccgcccaacgacccccgcccattgacgtcaataatgacgtatgttcccatagtaacgccaatagggactttccattgacgtcaatgggtggagtatttacggtaaactgcccacttggcagtacatcaa

SEQ ID NO: 77 - DNA, 5983 bp, Artificial Sequence
  Synthetic
gtgtatcatatgccaagtacgccccctattgacgtcaatgacggtaaatggcccgcctggcattatgcccagtacatgaccttatgggactttcctacttggcagtacatctacgtattagtcatcgctattaccatggtgatgcggttttggcagtacatcaatgggcgtggatagcggtttgactcacggggatttccaagtctccaccccattgacgtcaatgggagtttgttttggcaccaaaatcaacgggactttccaaaatgtcgtaacaactccgccccattgacgcaaatgggcggtaggcgtgtacggtgggaggtctatataagcagagctggtttagtgaaccgtcagatccgctagcgctaccggactcagatctcgagctcatgggggactggtctttccttgggaattttctcgaagaggtgcataaacattcaacagtagttggtaaagtatggttgactgtgctcttcattttccgaatgttggtcttgggcacggcggcagaatcaagctggggagatgaacaggctgactttcgatgtgacaccatacagcccggttgtcaaaacgtctgctacgatcaagcattccctattagccatatccgctactgggttctccagataatctttgtgtcaacaccctcattggtatacatgggccacgcgatgcacacggtccggatgcaggaaaaaaggaaactccgcgaggcggagcgggcaaaagaagttaggggctcagggtcatatgaatatcccgttgcggagaaggccgaactttcctgttgggaagaaggcaatggtagaattgcattgcaaggtacactcttgaacacatacgtgtgtagtattctgatacgaactacgatggaggtgggtttcatcgtagggcaatacttcatctatgggatcttcctgacgaccctccatgtatgccgacgctcaccatgtccacatccagtgaactgctacgtgtctcgaccaactgagaaaaatgtattcatagtcttcatgctggcggtagcagctctgagcctgctgctgtctttggcggagctgtaccacctggggtggaagaaaattaggcaacgattcgtgaagccgcgacagcatatggcaaaatgtcaattgagcggtccctctgttggcatagttcaatcatgcaccccgccgccagattttaatcaatgcttggaaaacgggcctggaggcaagtttttcaatccattttctaacaacatggcctcacagcaaaacacagacaacttggtaacagaacaagtgagaggccaagagcagacgcctggcgagggttttatacaggtgcgctatggacagaagccagaggtacccaacggcgtttcaccagggcaccgactgccgcacggatatcactccgacaaacggagactgtctaaagcttcctccaaggcccgcagtgatgacttgagcgtagatccaccggtcgccaccatggcgcgtaaggtcgatctcacctcctgcgatcgcgagccgatccacatccccggcagcattcagccgtgcggctgcctgctagcctgcgacgcgcaggcggtgcggatcacgcgcattacggaaaatgccggcgcgttctttggacgcgaaactccgcgggtcggtgagctactcgccgattacttcggcgagaccgaagcccatgcgctgcgcaacgcactggcgcagtcctccgatccaaagcgaccggcgctgatcttcggttggcgcgacggcctgaccggccgcaccttcgacatctcactgcatcgccatgacggtacatcgatcatcgagttcgagcctgcggcggccgaacaggccgacaatccgctgcggctgacgcggcagatcatcgcgcgcaccaaagaactgaagtcgctcgaagagatggccgcacgggtgccgcgctatctgcaggcgatgctcggctatcaccgcgtgatgttgtaccgcttcgcggacgacggctccgggatggtgatcggcgaggcgaagcgcagcgacctcgagagctttctcggtcagcactttccggcgtcgctggtcccgcagcaggcgcggctactgtacttgaagaacgcgatccgcgtggtctcggattcgcgcggcatcagcagccggatcgtgcccgagcacgacgcctccggcgccgcgctcgatctgtcgttcgcgcacctgcgcagcatctcgccctgccatctcgaatttctgcggaacatgggcgtcagcgcctcgatgtcgctgtcgatcatcattgacggcacgctatggggattgatcatctgtcatcattacgagccgcgtgccgtgccgatggcgcagcgcgtcgcggccgaaatgttcgccgacttcttatcgctgcacttcaccgccgcccaccaccaacgctaagcggccgcgactctagatcataatcagccataccacatttgtagaggttttacttgctttaaaaaacctcccacacctccccctgaacctgaaacataaaatgaatgcaattgttgttgttaacttgtttattgcagcttataatggttacaaataaagcaatagcatcacaaatttcacaaataaagcatttttttcactgcattctagttgtggtttgtccaaactcatcaatgtatcttaaggcgtaaattgtaagcgttaatattttgttaaaattcgcgttaaatttttgttaaatcagctcattttttaaccaataggccgaaatcggcaaaatcccttataaatcaaaagaatagaccgagatagggttgagtgttgttccagtttggaacaagagtccactattaaagaacgtggactccaacgtcaaagggcgaaaaaccgtctatcagggcgatggcccactacgtgaaccatcaccctaatcaagttttttggggtcgaggtgccgtaaagcactaaatcggaaccctaaagggagcccccgatttagagcttgacggggaaagccggcgaacgtggcgagaaaggaagggaagaaagcgaaaggagcgggcgctagggcgctggcaagtgtagcggtcacgctgcgcgtaaccaccacacccgccgcgcttaatgcgccgctacagggcgcgtcaggtggcacttttcggggaaatgtgcgcggaacccctatttgtttatttttctaaatacattcaaatatgtatccgctcatgagacaataaccctgataaatgcttcaataatattgaaaaaggaagagtcctgaggcggaaagaaccagctgtggaatgtgtgtcagttagggtgtggaaagtccccaggctccccagcaggcagaagtatgcaaagcatgcatctcaattagtcagcaaccaggtgtggaaagtccccaggctccccagcaggcagaagtatgcaaagcatgcatctcaattagtcagcaaccatagtcccgcccctaactccgcccatcccgcccctaactccgcccagttccgcccattctccgccccatggctgactaattttttttatttatgcagaggccgaggccgcctcggcctctgagctattccagaagtagtgaggaggcttttttggaggcctaggcttttgcaaagatcgatcaagagacaggatgaggatcgtttcgcatgattgaacaagatggattgcacgcaggttctccggccgcttgggtggagaggctattcggctatgactgggcacaacagacaatcggctgctctgatgccgccgtgttccggctgtcagcgcaggggcgcccggttctttttgtcaagaccgacctgtccggtgccctgaatgaactgcaagacgaggcagcgcggctatcgtggctggccacgacgggcgttccttgcgcagctgtgctcgacgttgtcactgaagcgggaagggactggctgctattgggcgaagtgccggggcaggatctcctgtcatctcaccttgctcctgccgagaaagtatccatcatggctgatgcaatgcggcggctgcatacgcttgatccggctacctgcccattcgaccaccaagcgaaacatcgcatcgagcgagcacgtactcggatggaagccggtcttgtcgatcaggatgatctggacgaagagcatcaggggctcgcgccagccgaactgttcgccaggctcaaggcgagcatgcccgacggcgaggatctcgtcgtgacccatggcgatgcctgcttgccgaatatcatggtggaaaatggccgcttttctggattcatcgactgtggccggctgggtgtggcggaccgctatcaggacatagcgttggctacccgtgatattgctgaagagcttggcggcgaatgggctgaccgcttcctcgtgctttacggtatcgccgctcccgattcgcagcgcatcgccttctatcgccttcttgacgagttcttctgagcgggactctggggttcgaaatgaccgaccaagcgacgcccaacctgccatcacgagatttcgattccaccgccgccttctatgaaaggttgggcttcggaatcgttttccgggacgccggctggatgatcctccagcgcggggatctcatgctggagttcttcgcccaccctagggggaggctaactgaaacacggaaggagacaataccggaaggaacccgcgctatgacggcaataaaaagacagaataaaacgcacggtgttgggtcgtttgttcataaacgcggggttcggtcccagggctggcactctgtcgataccccaccgagaccccattggggccaatacgcccgcgtttcttccttttccccaccccaccccccaagttcgggtgaaggcccagggctcgcagccaacgtcggggcggcaggccctgccatagcctcaggttactcatatatactttagattgatttaaaacttcatttttaatttaaaaggatctaggtgaagatcctttttgataatctcatgaccaaaatcccttaacgtgagttttcgttccactgagcgtcagaccccgtagaaaagatcaaaggatcttcttgagatcctttttttctgcgcgtaatctgctgcttgcaaacaaaaaaaccaccgctaccagcggtggtttgtttgccggatcaagagctaccaactctttttccgaaggtaactggcttcagcagagcgcagataccaaatactgttcttctagtgtagccgtagttaggccaccacttcaagaactctgtagcaccgcctacatacctcgctctgctaatcctgttaccagtggctgctgccagtggcgataagtcgtgtcttaccgggttggactcaagacgatagttaccggataaggcgcagcggtcgggctgaacggggggttcgtgcacacagcccagcttggagcgaacgacctacaccgaactgagatacctacagcgtgagctatgagaaagcgccacgcttcccgaagggagaaaggcggacaggtatccggtaagcggcagggtcggaacaggagagcgcacgagggagcttccagggggaaacgcctggtatctttatagtcctgtcgggtttcgccacctctgacttgagcgtcgatttttgtgatgctcgtcaggggggcggagcctatggaaaaacgccagcaacgcggcctttttacggttcctggccttttgctggccttttgctcacatgttctttcctgcgttatcccctgattctgtggataaccgtattaccgccatgcattagttattaatagtaatcaattacggggtcattagttcatagcccatatatggagttccgcgttacataacttacggtaaatggcccgcctggctgaccgcccaacgacccccgcccattgacgtcaataatgacgtatgttcccatagtaacgccaatagggactttccattgacgtcaatgggtggagtatttacggtaaactgcccacttggcagtacatcaa

SEQ ID NO: 78 - DNA, 6019 bp, Artificial Sequence
  Synthetic
gtgtatcatatgccaagtacgccccctattgacgtcaatgacggtaaatggcccgcctggcattatgcccagtacatgaccttatgggactttcctacttggcagtacatctacgtattagtcatcgctattaccatggtgatgcggttttggcagtacatcaatgggcgtggatagcggtttgactcacggggatttccaagtctccaccccattgacgtcaatgggagtttgttttggcaccaaaatcaacgggactttccaaaatgtcgtaacaactccgccccattgacgcaaatgggcggtaggcgtgtacggtgggaggtctatataagcagagctggtttagtgaaccgtcagatccgctagcgctaccggactcagatctcgagctcatggaaggcgtcgacttgctggggttcctcataattacattgaactgtaatgtgactatggttgggaaactctggttcgttcttacgatgttgctgagaatgctcgtcatcgtcttggcgggacggccggtctatcaggacgagcaagaaagattcgtatgcaacaccctccaacccggttgtgccaatgtgtgttatgacgtattcagtcctgtttctcatctgagattttggcttatccaaggcgtctgcgtattgctgccgagcgctgtattctccgtatacgtgcttcatcgaggtgcgacactggcagctctcgggcctagaaggtgccccgatcccagagaaccggcaagcggccaacggcgatgtccgagaccttttggggagagggggggacttcaggtccccgatttttctgcgggttatataatacatttgctcttgcggaccctgttggaagctgcttttggagcactgcactattttctttttgggtttcttgcgccgaaaaagtttccatgcacgcggcccccctgcacaggcgtggtggattgctatgtttcacgaccaacggaaaaatcccttctgatgcttttcctttgggctgtaagtgcactcagctttctccttgggctggctgatctggtatgtagccttcgcaggagaatgagacgccggcccggacccccgactagcccgtccattcgcaagcagtccggggcgagtggccacgccgaaggacgaaggaccgacgaagagggagggcgcgaagaagagggcgctccggcaccacccggggctagagccggaggagaaggggccggttctccgcgcagaacaagcagggtaagtgggcatacgaaaataccggacgaagatgagtccgaggtcactagttctgcctccgaaaaattggggaggcaaccaagaggtcgcccacatagagaggcggcacaggatccacgaggatccggaagtgaagagcaaccgagcgctgcgcctagccgattggcggccccccctagctgctcaagcctccaaccgcccgaccccccggcttccagctccggtgctccacatttgcgcgcccgcaagtctgaatgggtagatccaccggtcgccaccatggcgcgtaaggtcgatctcacctcctgcgatcgcgagccgatccacatccccggcagcattcagccgtgcggctgcctgctagcctgcgacgcgcaggcggtgcggatcacgcgcattacggaaaatgccggcgcgttctttggacgcgaaactccgcgggtcggtgagctactcgccgattacttcggcgagaccgaagcccatgcgctgcgcaacgcactggcgcagtcctccgatccaaagcgaccggcgctgatcttcggttggcgcgacggcctgaccggccgcaccttcgacatctcactgcatcgccatgacggtacatcgatcatcgagttcgagcctgcggcggccgaacaggccgacaatccgctgcggctgacgcggcagatcatcgcgcgcaccaaagaactgaagtcgctcgaagagatggccgcacgggtgccgcgctatctgcaggcgatgctcggctatcaccgcgtgatgttgtaccgcttcgcggacgacggctccgggatggtgatcggcgaggcgaagcgcagcgacctcgagagctttctcggtcagcactttccggcgtcgctggtcccgcagcaggcgcggctactgtacttgaagaacgcgatccgcgtggtctcggattcgcgcggcatcagcagccggatcgtgcccgagcacgacgcctccggcgccgcgctcgatctgtcgttcgcgcacctgcgcagcatctcgccctgccatctcgaatttctgcggaacatgggcgtcagcgcctcgatgtcgctgtcgatcatcattgacggcacgctatggggattgatcatctgtcatcattacgagccgcgtgccgtgccgatggcgcagcgcgtcgcggccgaaatgttcgccgacttcttatcgctgcacttcaccgccgcccaccaccaacgctaagcggccgcgactctagatcataatcagccataccacatttgtagaggttttacttgctttaaaaaacctcccacacctccccctgaacctgaaacataaaatgaatgcaattgttgttgttaacttgtttattgcagcttataatggttacaaataaagcaatagcatcacaaatttcacaaataaagcatttttttcactgcattctagttgtggtttgtccaaactcatcaatgtatcttaaggcgtaaattgtaagcgttaatattttgttaaaattcgcgttaaatttttgttaaatcagctcattttttaaccaataggccgaaatcggcaaaatcccttataaatcaaaagaatagaccgagatagggttgagtgttgttccagtttggaacaagagtccactattaaagaacgtggactccaacgtcaaagggcgaaaaaccgtctatcagggcgatggcccactacgtgaaccatcaccctaatcaagttttttggggtcgaggtgccgtaaagcactaaatcggaaccctaaagggagcccccgatttagagcttgacggggaaagccggcgaacgtggcgagaaaggaagggaagaaagcgaaaggagcgggcgctagggcgctggcaagtgtagcggtcacgctgcgcgtaaccaccacacccgccgcgcttaatgcgccgctacagggcgcgtcaggtggcacttttcggggaaatgtgcgcggaacccctatttgtttatttttctaaatacattcaaatatgtatccgctcatgagacaataaccctgataaatgcttcaataatattgaaaaaggaagagtcctgaggcggaaagaaccagctgtggaatgtgtgtcagttagggtgtggaaagtccccaggctccccagcaggcagaagtatgcaaagcatgcatctcaattagtcagcaaccaggtgtggaaagtccccaggctccccagcaggcagaagtatgcaaagcatgcatctcaattagtcagcaaccatagtcccgcccctaactccgcccatcccgcccctaactccgcccagttccgcccattctccgccccatggctgactaattttttttatttatgcagaggccgaggccgcctcggcctctgagctattccagaagtagtgaggaggcttttttggaggcctaggcttttgcaaagatcgatcaagagacaggatgaggatcgtttcgcatgattgaacaagatggattgcacgcaggttctccggccgcttgggtggagaggctattcggctatgactgggcacaacagacaatcggctgctctgatgccgccgtgttccggctgtcagcgcaggggcgcccggttctttttgtcaagaccgacctgtccggtgccctgaatgaactgcaagacgaggcagcgcggctatcgtggctggccacgacgggcgttccttgcgcagctgtgctcgacgttgtcactgaagcgggaagggactggctgctattgggcgaagtgccggggcaggatctcctgtcatctcaccttgctcctgccgagaaagtatccatcatggctgatgcaatgcggcggctgcatacgcttgatccggctacctgcccattcgaccaccaagcgaaacatcgcatcgagcgagcacgtactcggatggaagccggtcttgtcgatcaggatgatctggacgaagagcatcaggggctcgcgccagccgaactgttcgccaggctcaaggcgagcatgcccgacggcgaggatctcgtcgtgacccatggcgatgcctgcttgccgaatatcatggtggaaaatggccgcttttctggattcatcgactgtggccggctgggtgtggcggaccgctatcaggacatagcgttggctacccgtgatattgctgaagagcttggcggcgaatgggctgaccgcttcctcgtgctttacggtatcgccgctcccgattcgcagcgcatcgccttctatcgccttcttgacgagttcttctgagcgggactctggggttcgaaatgaccgaccaagcgacgcccaacctgccatcacgagatttcgattccaccgccgccttctatgaaaggttgggcttcggaatcgttttccgggacgccggctggatgatcctccagcgcggggatctcatgctggagttcttcgcccaccctagggggaggctaactgaaacacggaaggagacaataccggaaggaacccgcgctatgacggcaataaaaagacagaataaaacgcacggtgttgggtcgtttgttcataaacgcggggttcggtcccagggctggcactctgtcgataccccaccgagaccccattggggccaatacgcccgcgtttcttccttttccccaccccaccccccaagttcgggtgaaggcccagggctcgcagccaacgtcggggcggcaggccctgccatagcctcaggttactcatatatactttagattgatttaaaacttcatttttaatttaaaaggatctaggtgaagatcctttttgataatctcatgaccaaaatcccttaacgtgagttttcgttccactgagcgtcagaccccgtagaaaagatcaaaggatcttcttgagatcctttttttctgcgcgtaatctgctgcttgcaaacaaaaaaaccaccgctaccagcggtggtttgtttgccggatcaagagctaccaactctttttccgaaggtaactggcttcagcagagcgcagataccaaatactgttcttctagtgtagccgtagttaggccaccacttcaagaactctgtagcaccgcctacatacctcgctctgctaatcctgttaccagtggctgctgccagtggcgataagtcgtgtcttaccgggttggactcaagacgatagttaccggataaggcgcagcggtcgggctgaacggggggttcgtgcacacagcccagcttggagcgaacgacctacaccgaactgagatacctacagcgtgagctatgagaaagcgccacgcttcccgaagggagaaaggcggacaggtatccggtaagcggcagggtcggaacaggagagcgcacgagggagcttccagggggaaacgcctggtatctttatagtcctgtcgggtttcgccacctctgacttgagcgtcgatttttgtgatgctcgtcaggggggcggagcctatggaaaaacgccagcaacgcggcctttttacggttcctggccttttgctggccttttgctcacatgttctttcctgcgttatcccctgattctgtggataaccgtattaccgccatgcattagttattaatagtaatcaattacggggtcattagttcatagcccatatatggagttccgcgttacataacttacggtaaatggcccgcctggctgaccgcccaacgacccccgcccattgacgtcaataatgacgtatgttcccatagtaacgccaatagggactttccattgacgtcaatgggtggagtatttacggtaaactgcccacttggcagtacatcaa

SEQ ID NO: 79 - DNA, 6052 bp, Artificial Sequence
  Synthetic
atatatggagttccgcgttacataacttacggtaaatggcccgcctggctgaccgcccaacgacccccgcccattgacgtcaataatgacgtatgttcccatagtaacgccaatagggactttccattgacgtcaatgggtggagtatttacggtaaactgcccacttggcagtacatcaagtgtatcatatgccaagtacgccccctattgacgtcaatgacggtaaatggcccgcctggcattatgcccagtacatgaccttatgggactttcctacttggcagtacatctacgtattagtcatcgctattaccatggtgatgcggttttggcagtacatcaatgggcgtggatagcggtttgactcacggggatttccaagtctccaccccattgacgtcaatgggagtttgttttggcaccaaaatcaacgggactttccaaaatgtcgtaacaactccgccccattgacgcaaatgggcggtaggcgtgtacggtgggaggtctatataagcagagctggtttagtgaaccgtcagatccgctagcgctaccggactcagatctcgagatgggggattggtcagctcttggaaagctccttgacaaagtacaggcgtacagtactgccggaggaaaagtgtggctcagtgtactgtttatattccggattctgcttctcggcacagccgtggagagcgcatggggtgacgaacaaagcgcgttccggtgcaacacccaacaacctggatgtgaaaacgtttgttacgataagtcattccctatctcccacgtaaggttctgggtgttgcagataatcttcgtttctgtacccacccttctttatcttgcccatgtgttttacgtaatgagaaaggaggagaaacttaataagaaagaggaggaattgaaagtcgcgcaaacggatggcgttaatgtggatatgcatctgaagcaaatagagataaagaaattcaaatatggtattgaagaacatggaaaagtaaaaatgagaggtggtttgcttcggacgtatattatctccatactttttaaaagcatatttgaggtagccttcttgctgatacagtggtatatatacggcttttcattgagtgctgtgtacacatgcaagcgcgatccatgcccccatcaagtagattgtttcttgagcagaccgacagaaaaaactatcttcatcatttttatgctggtggtatccctggtttccctggcactcaacataatagaactcttctatgtgttcttcaagggggttaaggacagggtgaaaggtaagtccgacccatatcatgcgacctctggagcgctgtcccctgcaaaggactgtggaagccagaagtacgcctattttaatggatgttccagtcctacagcccctctgagccctatgtctccacccggatataaactggtgaccggtgatcgcaacaattcaagttgcaggaactataataagcaggcttccgaacagaattgggccaattacagtgccgaacaaaaccgaatgggacaagcgggatctaccatttctaattcacacgctcaaccgtttgacttccctgatgacaatcagaacagtaaaaagctcgcggctggccacgaactgcaaccgcttgcgatagtagaccaaagaccgagcagtcgagcgtcttccagagcaagctctcgcccacggccagacgatctggaaatagatccaccggtcgccaccatggcgcgtaaggtcgatctcacctcctgcgatcgcgagccgatccacatccccggcagcattcagccgtgcggctgcctgctagcctgcgacgcgcaggcggtgcggatcacgcgcattacggaaaatgccggcgcgttctttggacgcgaaactccgcgggtcggtgagctactcgccgattacttcggcgagaccgaagcccatgcgctgcgcaacgcactggcgcagtcctccgatccaaagcgaccggcgctgatcttcggttggcgcgacggcctgaccggccgcaccttcgacatctcactgcatcgccatgacggtacatcgatcatcgagttcgagcctgcggcggccgaacaggccgacaatccgctgcggctgacgcggcagatcatcgcgcgcaccaaagaactgaagtcgctcgaagagatggccgcacgggtgccgcgctatctgcaggcgatgctcggctatcaccgcgtgatgttgtaccgcttcgcggacgacggctccgggatggtgatcggcgaggcgaagcgcagcgacctcgagagctttctcggtcagcactttccggcgtcgctggtcccgcagcaggcgcggctactgtacttgaagaacgcgatccgcgtggtctcggattcgcgcggcatcagcagccggatcgtgcccgagcacgacgcctccggcgccgcgctcgatctgtcgttcgcgcacctgcgcagcatctcgccctgccatctcgaatttctgcggaacatgggcgtcagcgcctcgatgtcgctgtcgatcatcattgacggcacgctatggggattgatcatctgtcatcattacgagccgcgtgccgtgccgatggcgcagcgcgtcgcggccgaaatgttcgccgacttcttatcgctgcacttcaccgccgcccaccaccaacgctaagcggccgcgactctagatcataatcagccataccacatttgtagaggttttacttgctttaaaaaacctcccacacctccccctgaacctgaaacataaaatgaatgcaattgttgttgttaacttgtttattgcagcttataatggttacaaataaagcaatagcatcacaaatttcacaaataaagcatttttttcactgcattctagttgtggtttgtccaaactcatcaatgtatcttaaggcgtaaattgtaagcgttaatattttgttaaaattcgcgttaaatttttgttaaatcagctcattttttaaccaataggccgaaatcggcaaaatcccttataaatcaaaagaatagaccgagatagggttgagtgttgttccagtttggaacaagagtccactattaaagaacgtggactccaacgtcaaagggcgaaaaaccgtctatcagggcgatggcccactacgtgaaccatcaccctaatcaagttttttggggtcgaggtgccgtaaagcactaaatcggaaccctaaagggagcccccgatttagagcttgacggggaaagccggcgaacgtggcgagaaaggaagggaagaaagcgaaaggagcgggcgctagggcgctggcaagtgtagcggtcacgctgcgcgtaaccaccacacccgccgcgcttaatgcgccgctacagggcgcgtcaggtggcacttttcggggaaatgtgcgcggaacccctatttgtttatttttctaaatacattcaaatatgtatccgctcatgagacaataaccctgataaatgcttcaataatattgaaaaaggaagagtcctgaggcggaaagaaccagctgtggaatgtgtgtcagttagggtgtggaaagtccccaggctccccagcaggcagaagtatgcaaagcatgcatctcaattagtcagcaaccaggtgtggaaagtccccaggctccccagcaggcagaagtatgcaaagcatgcatctcaattagtcagcaaccatagtcccgcccctaactccgcccatcccgcccctaactccgcccagttccgcccattctccgccccatggctgactaattttttttatttatgcagaggccgaggccgcctcggcctctgagctattccagaagtagtgaggaggcttttttggaggcctaggcttttgcaaagatcgatcaagagacaggatgaggatcgtttcgcatgattgaacaagatggattgcacgcaggttctccggccgcttgggtggagaggctattcggctatgactgggcacaacagacaatcggctgctctgatgccgccgtgttccggctgtcagcgcaggggcgcccggttctttttgtcaagaccgacctgtccggtgccctgaatgaactgcaagacgaggcagcgcggctatcgtggctggccacgacgggcgttccttgcgcagctgtgctcgacgttgtcactgaagcgggaagggactggctgctattgggcgaagtgccggggcaggatctcctgtcatctcaccttgctcctgccgagaaagtatccatcatggctgatgcaatgcggcggctgcatacgcttgatccggctacctgcccattcgaccaccaagcgaaacatcgcatcgagcgagcacgtactcggatggaagccggtcttgtcgatcaggatgatctggacgaagagcatcaggggctcgcgccagccgaactgttcgccaggctcaaggcgagcatgcccgacggcgaggatctcgtcgtgacccatggcgatgcctgcttgccgaatatcatggtggaaaatggccgcttttctggattcatcgactgtggccggctgggtgtggcggaccgctatcaggacatagcgttggctacccgtgatattgctgaagagcttggcggcgaatgggctgaccgcttcctcgtgctttacggtatcgccgctcccgattcgcagcgcatcgccttctatcgccttcttgacgagttcttctgagcgggactctggggttcgaaatgaccgaccaagcgacgcccaacctgccatcacgagatttcgattccaccgccgccttctatgaaaggttgggcttcggaatcgttttccgggacgccggctggatgatcctccagcgcggggatctcatgctggagttcttcgcccaccctagggggaggctaactgaaacacggaaggagacaataccggaaggaacccgcgctatgacggcaataaaaagacagaataaaacgcacggtgttgggtcgtttgttcataaacgcggggttcggtcccagggctggcactctgtcgataccccaccgagaccccattggggccaatacgcccgcgtttcttccttttccccaccccaccccccaagttcgggtgaaggcccagggctcgcagccaacgtcggggcggcaggccctgccatagcctcaggttactcatatatactttagattgatttaaaacttcatttttaatttaaaaggatctaggtgaagatcctttttgataatctcatgaccaaaatcccttaacgtgagttttcgttccactgagcgtcagaccccgtagaaaagatcaaaggatcttcttgagatcctttttttctgcgcgtaatctgctgcttgcaaacaaaaaaaccaccgctaccagcggtggtttgtttgccggatcaagagctaccaactctttttccgaaggtaactggcttcagcagagcgcagataccaaatactgttcttctagtgtagccgtagttaggccaccacttcaagaactctgtagcaccgcctacatacctcgctctgctaatcctgttaccagtggctgctgccagtggcgataagtcgtgtcttaccgggttggactcaagacgatagttaccggataaggcgcagcggtcgggctgaacggggggttcgtgcacacagcccagcttggagcgaacgacctacaccgaactgagatacctacagcgtgagctatgagaaagcgccacgcttcccgaagggagaaaggcggacaggtatccggtaagcggcagggtcggaacaggagagcgcacgagggagcttccagggggaaacgcctggtatctttatagtcctgtcgggtttcgccacctctgacttgagcgtcgatttttgtgatgctcgtcaggggggcggagcctatggaaaaacgccagcaacgcggcctttttacggttcctggccttttgctggccttttgctcacatgttctttcctgcgttatcccctgattctgtggataaccgtattaccgccatgcattagttattaatagtaatcaattacggggtcattagttcatagccc

SEQ ID NO: 80 - DNA, 6097 bp, Artificial Sequence
  Synthetic
gtgtatcatatgccaagtacgccccctattgacgtcaatgacggtaaatggcccgcctggcattatgcccagtacatgaccttatgggactttcctacttggcagtacatctacgtattagtcatcgctattaccatggtgatgcggttttggcagtacatcaatgggcgtggatagcggtttgactcacggggatttccaagtctccaccccattgacgtcaatgggagtttgttttggcaccaaaatcaacgggactttccaaaatgtcgtaacaactccgccccattgacgcaaatgggcggtaggcgtgtacggtgggaggtctatataagcagagctggtttagtgaaccgtcagatccgctagcgctaccggactcagatctcgagctcatgtcatggtctttccttacccgcctcttggaagaaatccacaaccactctacctttgtggggaaaatttggcttacagtccttatagtcttccgaatcgttctcacggccgtcggcggcgaaagcatttactatgacgagcagtccaagttcgtttgcaatactgagcaaccaggatgcgagaacgtatgctatgatgcgtttgcccctctgagccatgtaaggttttgggttttccaaataatattggttgccactccgagcgtaatgtatttgggctacgcaatccacaagattgcgaaaatggagcatggtgaggcagacaaaaaggcggctagatcaaagccttatgctatgagatggaaacaacatcgggcactggaagagaccgaagaagacaatgaggaggatccaatgatgtatccagaaatggagctcgaatccgacaaggagaataaggagcaaagtcaaccaaagcctaagcacgatggacggaggaggattcgggaagatggccttatgaagatttatgtgttgcagctgcttgcaagaacggtattcgaagttggatttcttatcggccagtattttctctacggtttccaagttcaccctttctatgtttgttctcgactcccctgcccccacaaaatagactgtttcatcagtaggcccacggaaaaaactatttttttgctgataatgtacggcgtgactggtctttgtcttctgctcaacatatgggaaatgctgcatcttggatttggtaccattagagacagcctcaattccaaaaggagggagctcgaggaccctggcgcttataattacccatttacctggaatactccgtctgccccgccaggttacaacattgcggtcaaaccagatcaaatacagtatactgaactttcaaatgctaagattgcctacaagcagaacaaggctaatacggcacaggaacaacagtacggttcacacgaagaaaacctgccagcggatctcgaggcgttgcagcgagaaatcaggatggcacaagagcgacttgaccttgcagtacaggcatactcccatcagaataacccacatggcccccgcgagaaaaaagcgaaggtagggtcaaaagccggatctaataagtctactgcgtcctccaagagtggggacggcaagacatctgtctggatcgatccaccggtcgccaccatggcgcgtaaggtcgatctcacctcctgcgatcgcgagccgatccacatccccggcagcattcagccgtgcggctgcctgctagcctgcgacgcgcaggcggtgcggatcacgcgcattacggaaaatgccggcgcgttctttggacgcgaaactccgcgggtcggtgagctactcgccgattacttcggcgagaccgaagcccatgcgctgcgcaacgcactggcgcagtcctccgatccaaagcgaccggcgctgatcttcggttggcgcgacggcctgaccggccgcaccttcgacatctcactgcatcgccatgacggtacatcgatcatcgagttcgagcctgcggcggccgaacaggccgacaatccgctgcggctgacgcggcagatcatcgcgcgcaccaaagaactgaagtcgctcgaagagatggccgcacgggtgccgcgctatctgcaggcgatgctcggctatcaccgcgtgatgttgtaccgcttcgcggacgacggctccgggatggtgatcggcgaggcgaagcgcagcgacctcgagagctttctcggtcagcactttccggcgtcgctggtcccgcagcaggcgcggctactgtacttgaagaacgcgatccgcgtggtctcggattcgcgcggcatcagcagccggatcgtgcccgagcacgacgcctccggcgccgcgctcgatctgtcgttcgcgcacctgcgcagcatctcgccctgccatctcgaatttctgcggaacatgggcgtcagcgcctcgatgtcgctgtcgatcatcattgacggcacgctatggggattgatcatctgtcatcattacgagccgcgtgccgtgccgatggcgcagcgcgtcgcggccgaaatgttcgccgacttcttatcgctgcacttcaccgccgcccaccaccaacgctaagcggccgcgactctagatcataatcagccataccacatttgtagaggttttacttgctttaaaaaacctcccacacctccccctgaacctgaaacataaaatgaatgcaattgttgttgttaacttgtttattgcagcttataatggttacaaataaagcaatagcatcacaaatttcacaaataaagcatttttttcactgcattctagttgtggtttgtccaaactcatcaatgtatcttaaggcgtaaattgtaagcgttaatattttgttaaaattcgcgttaaatttttgttaaatcagctcattttttaaccaataggccgaaatcggcaaaatcccttataaatcaaaagaatagaccgagatagggttgagtgttgttccagtttggaacaagagtccactattaaagaacgtggactccaacgtcaaagggcgaaaaaccgtctatcagggcgatggcccactacgtgaaccatcaccctaatcaagttttttggggtcgaggtgccgtaaagcactaaatcggaaccctaaagggagcccccgatttagagcttgacggggaaagccggcgaacgtggcgagaaaggaagggaagaaagcgaaaggagcgggcgctagggcgctggcaagtgtagcggtcacgctgcgcgtaaccaccacacccgccgcgcttaatgcgccgctacagggcgcgtcaggtggcacttttcggggaaatgtgcgcggaacccctatttgtttatttttctaaatacattcaaatatgtatccgctcatgagacaataaccctgataaatgcttcaataatattgaaaaaggaagagtcctgaggcggaaagaaccagctgtggaatgtgtgtcagttagggtgtggaaagtccccaggctccccagcaggcagaagtatgcaaagcatgcatctcaattagtcagcaaccaggtgtggaaagtccccaggctccccagcaggcagaagtatgcaaagcatgcatctcaattagtcagcaaccatagtcccgcccctaactccgcccatcccgcccctaactccgcccagttccgcccattctccgccccatggctgactaattttttttatttatgcagaggccgaggccgcctcggcctctgagctattccagaagtagtgaggaggcttttttggaggcctaggcttttgcaaagatcgatcaagagacaggatgaggatcgtttcgcatgattgaacaagatggattgcacgcaggttctccggccgcttgggtggagaggctattcggctatgactgggcacaacagacaatcggctgctctgatgccgccgtgttccggctgtcagcgcaggggcgcccggttctttttgtcaagaccgacctgtccggtgccctgaatgaactgcaagacgaggcagcgcggctatcgtggctggccacgacgggcgttccttgcgcagctgtgctcgacgttgtcactgaagcgggaagggactggctgctattgggcgaagtgccggggcaggatctcctgtcatctcaccttgctcctgccgagaaagtatccatcatggctgatgcaatgcggcggctgcatacgcttgatccggctacctgcccattcgaccaccaagcgaaacatcgcatcgagcgagcacgtactcggatggaagccggtcttgtcgatcaggatgatctggacgaagagcatcaggggctcgcgccagccgaactgttcgccaggctcaaggcgagcatgcccgacggcgaggatctcgtcgtgacccatggcgatgcctgcttgccgaatatcatggtggaaaatggccgcttttctggattcatcgactgtggccggctgggtgtggcggaccgctatcaggacatagcgttggctacccgtgatattgctgaagagcttggcggcgaatgggctgaccgcttcctcgtgctttacggtatcgccgctcccgattcgcagcgcatcgccttctatcgccttcttgacgagttcttctgagcgggactctggggttcgaaatgaccgaccaagcgacgcccaacctgccatcacgagatttcgattccaccgccgccttctatgaaaggttgggcttcggaatcgttttccgggacgccggctggatgatcctccagcgcggggatctcatgctggagttcttcgcccaccctagggggaggctaactgaaacacggaaggagacaataccggaaggaacccgcgctatgacggcaataaaaagacagaataaaacgcacggtgttgggtcgtttgttcataaacgcggggttcggtcccagggctggcactctgtcgataccccaccgagaccccattggggccaatacgcccgcgtttcttccttttccccaccccaccccccaagttcgggtgaaggcccagggctcgcagccaacgtcggggcggcaggccctgccatagcctcaggttactcatatatactttagattgatttaaaacttcatttttaatttaaaaggatctaggtgaagatcctttttgataatctcatgaccaaaatcccttaacgtgagttttcgttccactgagcgtcagaccccgtagaaaagatcaaaggatcttcttgagatcctttttttctgcgcgtaatctgctgcttgcaaacaaaaaaaccaccgctaccagcggtggtttgtttgccggatcaagagctaccaactctttttccgaaggtaactggcttcagcagagcgcagataccaaatactgttcttctagtgtagccgtagttaggccaccacttcaagaactctgtagcaccgcctacatacctcgctctgctaatcctgttaccagtggctgctgccagtggcgataagtcgtgtcttaccgggttggactcaagacgatagttaccggataaggcgcagcggtcgggctgaacggggggttcgtgcacacagcccagcttggagcgaacgacctacaccgaactgagatacctacagcgtgagctatgagaaagcgccacgcttcccgaagggagaaaggcggacaggtatccggtaagcggcagggtcggaacaggagagcgcacgagggagcttccagggggaaacgcctggtatctttatagtcctgtcgggtttcgccacctctgacttgagcgtcgatttttgtgatgctcgtcaggggggcggagcctatggaaaaacgccagcaacgcggcctttttacggttcctggccttttgctggccttttgctcacatgttctttcctgcgttatcccctgattctgtggataaccgtattaccgccatgcattagttattaatagtaatcaattacggggtcattagttcatagcccatatatggagttccgcgttacataacttacggtaaatggcccgcctggctgaccgcccaacgacccccgcccattgacgtcaataatgacgtatgttcccatagtaacgccaatagggactttccattgacgtcaatgggtggagtatttacggtaaactgcccacttggcagtacatcaa

SEQ ID NO: 81 - DNA, 5999 bp, Artificial Sequence; identical to SEQ ID NO: 59
  Synthetic

SEQ ID NO: 82 - DNA, 6226 bp, Artificial Sequence
  Synthetic
gtgtatcatatgccaagtacgccccctattgacgtcaatgacggtaaatggcccgcctggcattatgcccagtacatgaccttatgggactttcctacttggcagtacatctacgtattagtcatcgctattaccatggtgatgcggttttggcagtacatcaatgggcgtggatagcggtttgactcacggggatttccaagtctccaccccattgacgtcaatgggagtttgttttggcaccaaaatcaacgggactttccaaaatgtcgtaacaactccgccccattgacgcaaatgggcggtaggcgtgtacggtgggaggtctatataagcagagctggtttagtgaaccgtcagatccgctagcgctaccggactcagatctcgagctcatgaccaatatgagttggtccttcctcacaagactgttggaggagatccacaaccacagtactttcgtaggtaaggtctggctgacagttctcgtggtttttagaatagtgcttacagctgtcgggggtgaggcgatttattctgacgaacaagctaaattcacatgtaacacgagacaaccgggatgtgataatgtgtgctatgacgcattcgctccactgtctcacgtgcggttttgggtttttcaaattgtggtaatttccactccttctgtgatgtatctcggctatgccgtccatcgacttgctcgcgcaagcgaacaagaaagacgccgcgcgctgcgacgacggcccgggccccggagagcccccagagcccaccttccacctccacacgctggctggccagaaccggccgatctgggtgaggaggaaccgatgttgggtttgggagaggaagaggaggaagaagagactggagcagccgaaggagcaggggaggaagctgaggaggcaggcgcagaagaagcatgtacaaaggccgtaggtgccgatggcaaagccgcaggcacgcctggaccaacaggccaacatgatggccggagaaggatacagcgagagggtctgatgagggtatatgtcgctcaactggtagctcgcgcggctttcgaggtggcgttcctcgtcggtcaatatctgctctatggtttcgaggtaagaccattttttccatgtagccggcaaccttgcccgcacgtcgtggactgctttgtatctaggccaacggaaaagacagtttttttgttggtcatgtatgtggtcagttgcctctgtttgctgctcaacctgtgtgagatggcccatctggggctggggtcagcacaagatgccgttaggggcagaagaggcccgcccgcgagtgcccccgcgccggcccctaggccgcccccatgtgcttttcctgcggctgccgctggtctcgcttgtccgcccgattactctctggtcgtcagagcggccgaaagagcaagagcacatgaccagaatctcgccaacctcgctttgcaggcacttcgggacggggcagccgccggggatcgcgatagggactcatctccctgcgtcggactccccgctgcttcacgagggcctccgagagcaggcgcaccggcgtctcggactggaagtgcgacatctgcgggcaccgtaggggaacaaggcagaccgggaacgcacgagagacctggggccaaacctcgcgctgggtccgaaaagggaagtgcatcatctcgggatggtaaaacaactgtgtggatagatccaccggtcgccaccatggcgcgtaaggtcgatctcacctcctgcgatcgcgagccgatccacatccccggcagcattcagccgtgcggctgcctgctagcctgcgacgcgcaggcggtgcggatcacgcgcattacggaaaatgccggcgcgttctttggacgcgaaactccgcgggtcggtgagctactcgccgattacttcggcgagaccgaagcccatgcgctgcgcaacgcactggcgcagtcctccgatccaaagcgaccggcgctgatcttcggttggcgcgacggcctgaccggccgcaccttcgacatctcactgcatcgccatgacggtacatcgatcatcgagttcgagcctgcggcggccgaacaggccgacaatccgctgcggctgacgcggcagatcatcgcgcgcaccaaagaactgaagtcgctcgaagagatggccgcacgggtgccgcgctatctgcaggcgatgctcggctatcaccgcgtgatgttgtaccgcttcgcggacgacggctccgggatggtgatcggcgaggcgaagcgcagcgacctcgagagctttctcggtcagcactttccggcgtcgctggtcccgcagcaggcgcggctactgtacttgaagaacgcgatccgcgtggtctcggattcgcgcggcatcagcagccggatcgtgcccgagcacgacgcctccggcgccgcgctcgatctgtcgttcgcgcacctgcgcagcatctcgccctgccatctcgaatttctgcggaacatgggcgtcagcgcctcgatgtcgctgtcgatcatcattgacggcacgctatggggattgatcatctgtcatcattacgagccgcgtgccgtgccgatggcgcagcgcgtcgcggccgaaatgttcgccgacttcttatcgctgcacttcaccgccgcccaccaccaacgctaagcggccgcgactctagatcataatcagccataccacatttgtagaggttttacttgctttaaaaaacctcccacacctccccctgaacctgaaacataaaatgaatgcaattgttgttgttaacttgtttattgcagcttataatggttacaaataaagcaatagcatcacaaatttcacaaataaagcatttttttcactgcattctagttgtggtttgtccaaactcatcaatgtatcttaaggcgtaaattgtaagcgttaatattttgttaaaattcgcgttaaatttttgttaaatcagctcattttttaaccaataggccgaaatcggcaaaatcccttataaatcaaaagaatagaccgagatagggttgagtgttgttccagtttggaacaagagtccactattaaagaacgtggactccaacgtcaaagggcgaaaaaccgtctatcagggcgatggcccactacgtgaaccatcaccctaatcaagttttttggggtcgaggtgccgtaaagcactaaatcggaaccctaaagggagcccccgatttagagcttgacggggaaagccggcgaacgtggcgagaaaggaagggaagaaagcgaaaggagcgggcgctagggcgctggcaagtgtagcggtcacgctgcgcgtaaccaccacacccgccgcgcttaatgcgccgctacagggcgcgtcaggtggcacttttcggggaaatgtgcgcggaacccctatttgtttatttttctaaatacattcaaatatgtatccgctcatgagacaataaccctgataaatgcttcaataatattgaaaaaggaagagtcctgaggcggaaagaaccagctgtggaatgtgtgtcagttagggtgtggaaagtccccaggctccccagcaggcagaagtatgcaaagcatgcatctcaattagtcagcaaccaggtgtggaaagtccccaggctccccagcaggcagaagtatgcaaagcatgcatctcaattagtcagcaaccatagtcccgcccctaactccgcccatcccgcccctaactccgcccagttccgcccattctccgccccatggctgactaattttttttatttatgcagaggccgaggccgcctcggcctctgagctattccagaagtagtgaggaggcttttttggaggcctaggcttttgcaaagatcgatcaagagacaggatgaggatcgtttcgcatgattgaacaagatggattgcacgcaggttctccggccgcttgggtggagaggctattcggctatgactgggcacaacagacaatcggctgctctgatgccgccgtgttccggctgtcagcgcaggggcgcccggttctttttgtcaagaccgacctgtccggtgccctgaatgaactgcaagacgaggcagcgcggctatcgtggctggccacgacgggcgttccttgcgcagctgtgctcgacgttgtcactgaagcgggaagggactggctgctattgggcgaagtgccggggcaggatctcctgtcatctcaccttgctcctgccgagaaagtatccatcatggctgatgcaatgcggcggctgcatacgcttgatccggctacctgcccattcgaccaccaagcgaaacatcgcatcgagcgagcacgtactcggatggaagccggtcttgtcgatcaggatgatctggacgaagagcatcaggggctcgcgccagccgaactgttcgccaggctcaaggcgagcatgcccgacggcgaggatctcgtcgtgacccatggcgatgcctgcttgccgaatatcatggtggaaaatggccgcttttctggattcatcgactgtggccggctgggtgtggcggaccgctatcaggacatagcgttggctacccgtgatattgctgaagagcttggcggcgaatgggctgaccgcttcctcgtgctttacggtatcgccgctcccgattcgcagcgcatcgccttctatcgccttcttgacgagttcttctgagcgggactctggggttcgaaatgaccgaccaagcgacgcccaacctgccatcacgagatttcgattccaccgccgccttctatgaaaggttgggcttcggaatcgttttccgggacgccggctggatgatcctccagcgcggggatctcatgctggagttcttcgcccaccctagggggaggctaactgaaacacggaaggagacaataccggaaggaacccgcgctatgacggcaataaaaagacagaataaaacgcacggtgttgggtcgtttgttcataaacgcggggttcggtcccagggctggcactctgtcgataccccaccgagaccccattggggccaatacgcccgcgtttcttccttttccccaccccaccccccaagttcgggtgaaggcccagggctcgcagccaacgtcggggcggcaggccctgccatagcctcaggttactcatatatactttagattgatttaaaacttcatttttaatttaaaaggatctaggtgaagatcctttttgataatctcatgaccaaaatcccttaacgtgagttttcgttccactgagcgtcagaccccgtagaaaagatcaaaggatcttcttgagatcctttttttctgcgcgtaatctgctgcttgcaaacaaaaaaaccaccgctaccagcggtggtttgtttgccggatcaagagctaccaactctttttccgaaggtaactggcttcagcagagcgcagataccaaatactgttcttctagtgtagccgtagttaggccaccacttcaagaactctgtagcaccgcctacatacctcgctctgctaatcctgttaccagtggctgctgccagtggcgataagtcgtgtcttaccgggttggactcaagacgatagttaccggataaggcgcagcggtcgggctgaacggggggttcgtgcacacagcccagcttggagcgaacgacctacaccgaactgagatacctacagcgtgagctatgagaaagcgccacgcttcccgaagggagaaaggcggacaggtatccggtaagcggcagggtcggaacaggagagcgcacgagggagcttccagggggaaacgcctggtatctttatagtcctgtcgggtttcgccacctctgacttgagcgtcgatttttgtgatgctcgtcaggggggcggagcctatggaaaaacgccagcaacgcggcctttttacggttcctggccttttgctggccttttgctcacatgttctttcctgcgttatcccctgattctgtggataaccgtattaccgccatgcattagttattaatagtaatcaattacggggtcattagttcatagcccatatatggagttccgcgttacataacttacggtaaatggcccgcctggctgaccgcccaacgacccccgcccattgacgtcaataatgacgtatgttcccatagtaacgccaatagggactttccattgacgtcaatgggtggagtatttacggtaaactgcccacttggcagtacatcaa

SEQ ID NO: 83 - DNA, 6208 bp, Artificial Sequence
  Synthetic
gtgtatcatatgccaagtacgccccctattgacgtcaatgacggtaaatggcccgcctggcattatgcccagtacatgaccttatgggactttcctacttggcagtacatctacgtattagtcatcgctattaccatggtgatgcggttttggcagtacatcaatgggcgtggatagcggtttgactcacggggatttccaagtctccaccccattgacgtcaatgggagtttgttttggcaccaaaatcaacgggactttccaaaatgtcgtaacaactccgccccattgacgcaaatgggcggtaggcgtgtacggtgggaggtctatataagcagagctggtttagtgaaccgtcagatccgctagcgctaccggactcagatctcgagctcatgggggattggtctttcctggggaacattctcgaagaagtgaatgagcatagcaccgtgataggtcgggtctggcttaccgtgcttttcatattcagaattttgatacttggaacagcagccgagtttgtatggggtgacgagcagagtgactttgtgtgcaacactcaacaaccggggtgtgagaatgtttgttacgatgaggcatttcccatctcacacatcagactgtgggtgcttcaaatcatattcgtcagcaccccaagccttatgtacgttggtcatgcggttcactacgtgagaatggaggagaaacgaaagtcaagggaggcagaggaactgggtcaacaggcaggcactaacggcggcccagatcaagggagtgttaagaaaagttccggttcaaaggggacaaagaaattccggctggaaggaactttgttgcgaacgtatatatgtcatatcatctttaaaacgctgttcgaggtgggatttatagtaggtcactacttcttgtacgggttccgcatactccctctgtacagatgttctaggtggccgtgtccgaatgttgtagattgcttcgtatcccgacccactgaaaaaaccatttttatcttgttcatgctcagcgtcgcttcagtaagcctctttctgaacgtgatggaattgggtcacctgggcctgaaaggaatcaggagtgctctgaaacggccagtggagcagcctctcggggagattccggagaagtctttgcatagtattgctgtatcttctattcagaaggccaaaggctatcagctcctcgaagaggaaaaaatagtgtctcattatttcccattgaccgaagtaggcatggtggagacaagccctctccccgccaagccattcaatcagtttgaggagaaaatatccactggtccgttgggtgacctctcccgaggttaccaagagacactcccgtcatacgcccaggttggggcacaagaggtcgagggagaagggccacctgccgaagagggtgctgaacctgaagtaggcgagaagaaagaggaagctgaacgactcaccactgaggaacaagagaaggtggcagtgcccgaaggcgagaaagtcgaaacgcctggagtagataaagagggggaaaaggaagagcctcaatccgaaaaggttagtaaacaaggattgcctgcagaaaagacgcccagtctttgcccagagctcacaacagatgacgcgcgaccgctctcaagactttccaaggcgtccagtcgagcgcgcagtgacgatctgaccgttgatccaccggtcgccaccatggcgcgtaaggtcgatctcacctcctgcgatcgcgagccgatccacatccccggcagcattcagccgtgcggctgcctgctagcctgcgacgcgcaggcggtgcggatcacgcgcattacggaaaatgccggcgcgttctttggacgcgaaactccgcgggtcggtgagctactcgccgattacttcggcgagaccgaagcccatgcgctgcgcaacgcactggcgcagtcctccgatccaaagcgaccggcgctgatcttcggttggcgcgacggcctgaccggccgcaccttcgacatctcactgcatcgccatgacggtacatcgatcatcgagttcgagcctgcggcggccgaacaggccgacaatccgctgcggctgacgcggcagatcatcgcgcgcaccaaagaactgaagtcgctcgaagagatggccgcacgggtgccgcgctatctgcaggcgatgctcggctatcaccgcgtgatgttgtaccgcttcgcggacgacggctccgggatggtgatcggcgaggcgaagcgcagcgacctcgagagctttctcggtcagcactttccggcgtcgctggtcccgcagcaggcgcggctactgtacttgaagaacgcgatccgcgtggtctcggattcgcgcggcatcagcagccggatcgtgcccgagcacgacgcctccggcgccgcgctcgatctgtcgttcgcgcacctgcgcagcatctcgccctgccatctcgaatttctgcggaacatgggcgtcagcgcctcgatgtcgctgtcgatcatcattgacggcacgctatggggattgatcatctgtcatcattacgagccgcgtgccgtgccgatggcgcagcgcgtcgcggccgaaatgttcgccgacttcttatcgctgcacttcaccgccgcccaccaccaacgctaagcggccgcgactctagatcataatcagccataccacatttgtagaggttttacttgctttaaaaaacctcccacacctccccctgaacctgaaacataaaatgaatgcaattgttgttgttaacttgtttattgcagcttataatggttacaaataaagcaatagcatcacaaatttcacaaataaagcatttttttcactgcattctagttgtggtttgtccaaactcatcaatgtatcttaaggcgtaaattgtaagcgttaatattttgttaaaattcgcgttaaatttttgttaaatcagctcattttttaaccaataggccgaaatcggcaaaatcccttataaatcaaaagaatagaccgagatagggttgagtgttgttccagtttggaacaagagtccactattaaagaacgtggactccaacgtcaaagggcgaaaaaccgtctatcagggcgatggcccactacgtgaaccatcaccctaatcaagttttttggggtcgaggtgccgtaaagcactaaatcggaaccctaaagggagcccccgatttagagcttgacggggaaagccggcgaacgtggcgagaaaggaagggaagaaagcgaaaggagcgggcgctagggcgctggcaagtgtagcggtcacgctgcgcgtaaccaccacacccgccgcgcttaatgcgccgctacagggcgcgtcaggtggcacttttcggggaaatgtgcgcggaacccctatttgtttatttttctaaatacattcaaatatgtatccgctcatgagacaataaccctgataaatgcttcaataatattgaaaaaggaagagtcctgaggcggaaagaaccagctgtggaatgtgtgtcagttagggtgtggaaagtccccaggctccccagcaggcagaagtatgcaaagcatgcatctcaattagtcagcaaccaggtgtggaaagtccccaggctccccagcaggcagaagtatgcaaagcatgcatctcaattagtcagcaaccatagtcccgcccctaactccgcccatcccgcccctaactccgcccagttccgcccattctccgccccatggctgactaattttttttatttatgcagaggccgaggccgcctcggcctctgagctattccagaagtagtgaggaggcttttttggaggcctaggcttttgcaaagatcgatcaagagacaggatgaggatcgtttcgcatgattgaacaagatggattgcacgcaggttctccggccgcttgggtggagaggctattcggctatgactgggcacaacagacaatcggctgctctgatgccgccgtgttccggctgtcagcgcaggggcgcccggttctttttgtcaagaccgacctgtccggtgccctgaatgaactgcaagacgaggcagcgcggctatcgtggctggccacgacgggcgttccttgcgcagctgtgctcgacgttgtcactgaagcgggaagggactggctgctattgggcgaagtgccggggcaggatctcctgtcatctcaccttgctcctgccgagaaagtatccatcatggctgatgcaatgcggcggctgcatacgcttgatccggctacctgcccattcgaccaccaagcgaaacatcgcatcgagcgagcacgtactcggatggaagccggtcttgtcgatcaggatgatctggacgaagagcatcaggggctcgcgccagccgaactgttcgccaggctcaaggcgagcatgcccgacggcgaggatctcgtcgtgacccatggcgatgcctgcttgccgaatatcatggtggaaaatggccgcttttctggattcatcgactgtggccggctgggtgtggcggaccgctatcaggacatagcgttggctacccgtgatattgctgaagagcttggcggcgaatgggctgaccgcttcctcgtgctttacggtatcgccgctcccgattcgcagcgcatcgccttctatcgccttcttgacgagttcttctgagcgggactctggggttcgaaatgaccgaccaagcgacgcccaacctgccatcacgagatttcgattccaccgccgccttctatgaaaggttgggcttcggaatcgttttccgggacgccggctggatgatcctccagcgcggggatctcatgctggagttcttcgcccaccctagggggaggctaactgaaacacggaaggagacaataccggaaggaacccgcgctatgacggcaataaaaagacagaataaaacgcacggtgttgggtcgtttgttcataaacgcggggttcggtcccagggctggcactctgtcgataccccaccgagaccccattggggccaatacgcccgcgtttcttccttttccccaccccaccccccaagttcgggtgaaggcccagggctcgcagccaacgtcggggcggcaggccctgccatagcctcaggttactcatatatactttagattgatttaaaacttcatttttaatttaaaaggatctaggtgaagatcctttttgataatctcatgaccaaaatcccttaacgtgagttttcgttccactgagcgtcagaccccgtagaaaagatcaaaggatcttcttgagatcctttttttctgcgcgtaatctgctgcttgcaaacaaaaaaaccaccgctaccagcggtggtttgtttgccggatcaagagctaccaactctttttccgaaggtaactggcttcagcagagcgcagataccaaatactgttcttctagtgtagccgtagttaggccaccacttcaagaactctgtagcaccgcctacatacctcgctctgctaatcctgttaccagtggctgctgccagtggcgataagtcgtgtcttaccgggttggactcaagacgatagttaccggataaggcgcagcggtcgggctgaacggggggttcgtgcacacagcccagcttggagcgaacgacctacaccgaactgagatacctacagcgtgagctatgagaaagcgccacgcttcccgaagggagaaaggcggacaggtatccggtaagcggcagggtcggaacaggagagcgcacgagggagcttccagggggaaacgcctggtatctttatagtcctgtcgggtttcgccacctctgacttgagcgtcgatttttgtgatgctcgtcaggggggcggagcctatggaaaaacgccagcaacgcggcctttttacggttcctggccttttgctggccttttgctcacatgttctttcctgcgttatcccctgattctgtggataaccgtattaccgccatgcattagttattaatagtaatcaattacggggtcattagttcatagcccatatatggagttccgcgttacataacttacggtaaatggcccgcctggctgaccgcccaacgacccccgcccattgacgtcaataatgacgtatgttcccatagtaacgccaatagggactttccattgacgtcaatgggtggagtatttacggtaaactgcccacttggcagtacatcaa

SEQ ID NO: 84 - DNA, 6454 bp, Artificial Sequence
  Synthetic
gtgtatcatatgccaagtacgccccctattgacgtcaatgacggtaaatggcccgcctggcattatgcccagtacatgaccttatgggactttcctacttggcagtacatctacgtattagtcatcgctattaccatggtgatgcggttttggcagtacatcaatgggcgtggatagcggtttgactcacggggatttccaagtctccaccccattgacgtcaatgggagtttgttttggcaccaaaatcaacgggactttccaaaatgtcgtaacaactccgccccattgacgcaaatgggcggtaggcgtgtacggtgggaggtctatataagcagagctggtttagtgaaccgtcagatccgctagcgctaccggactcagatctcgagctcatgggtgactggaatctccttggggacactctggaagaggttcatatacacagcacgatgatcggaaaaatctggctcacgatcctctttatttttcgaatgctggtacttggtgttgcggcagaggacgtatggaatgatgagcaatccgggtttatatgtaacaccgagcaacccggctgtcgcaacgtttgctatgatcaggcatttcccatttctcttattcgatactgggtactgcaagtaattttcgtgtcaagtccctcactggtctacatgggacacgcgctttatcggcttcgcgttttggaggaggaaaggcaaaggatgaaagcacaactgcgggttgagctcgaagaagtagaattcgagatgccccgagatcggcgccgattggagcaagagctgtgccagctggagaagagaaaactcaacaaagccccacttcgcgggactcttctgtgcacctacgtgattcatatcttcacccgctccgtagtggaggttgggttcatgatcgggcagtatctgctttatgggttccacctggaacccctgtttaagtgtcacggtcacccatgccccaacataatagactgctttgtatcacggcctactgagaagacgattttcctgctgttcatgcaatccattgcaaccatcagtctcttcttgaacatcctggagatctttcaccttggatttaagaaaattaaacggggtctctggggcaagtataaattgaagaaggaacacaacgagttccatgctaacaaagccaagcagaatgttgcaaagtaccaatccacgagtgcaaatagcctcaaacgcctccccagtgctccagactacaacttgttggtagagaagcaaacacatacagccgtttacccatcactgaactcctcctccgttttccagcccaatcctgacaaccacagtgtaaatgacgaaaagtgcatcttggacgagcaggaaacggtcctgagtaacgagataagcactctgtccacgtcttgcagccatttccaacacatttccagcaataacaacaaagacactcataaaatattcggcaaagagctgaacggtaaccagctcatggagaaacgggagacagagggtaaagactcaaagcggaactattattcaaggggtcatagatccatacctggcgtagcaatagacggggagaataacatgagacaaagcccgcagaccgtgtttagcctccccgccaattgcgactggaagccaagatggctccgagccacatggggcagttccacggagcacgaaaataggggaagtccaccgaagggtaatctcaaggggcagtttaggaaggggactgtgcgcactcttccgccttcacaaggagacagccaatcacttgacatccccaacaccgctgattctctcggcgggctgtcatttgagccaggtcttgttaggacctgtaacaacccagtatgccccccaaatcatgtagttagcttgacgaataaccttatcggccgcagagtccccactgatctgcaaatagatccaccggtcgccaccatggcgcgtaaggtcgatctcacctcctgcgatcgcgagccgatccacatccccggcagcattcagccgtgcggctgcctgctagcctgcgacgcgcaggcggtgcggatcacgcgcattacggaaaatgccggcgcgttctttggacgcgaaactccgcgggtcggtgagctactcgccgattacttcggcgagaccgaagcccatgcgctgcgcaacgcactggcgcagtcctccgatccaaagcgaccggcgctgatcttcggttggcgcgacggcctgaccggccgcaccttcgacatctcactgcatcgccatgacggtacatcgatcatcgagttcgagcctgcggcggccgaacaggccgacaatccgctgcggctgacgcggcagatcatcgcgcgcaccaaagaactgaagtcgctcgaagagatggccgcacgggtgccgcgctatctgcaggcgatgctcggctatcaccgcgtgatgttgtaccgcttcgcggacgacggctccgggatggtgatcggcgaggcgaagcgcagcgacctcgagagctttctcggtcagcactttccggcgtcgctggtcccgcagcaggcgcggctactgtacttgaagaacgcgatccgcgtggtctcggattcgcgcggcatcagcagccggatcgtgcccgagcacgacgcctccggcgccgcgctcgatctgtcgttcgcgcacctgcgcagcatctcgccctgccatctcgaatttctgcggaacatgggcgtcagcgcctcgatgtcgctgtcgatcatcattgacggcacgctatggggattgatcatctgtcatcattacgagccgcgtgccgtgccgatggcgcagcgcgtcgcggccgaaatgttcgccgacttcttatcgctgcacttcaccgccgcccaccaccaacgctaagcggccgcgactctagatcataatcagccataccacatttgtagaggttttacttgctttaaaaaacctcccacacctccccctgaacctgaaacataaaatgaatgcaattgttgttgttaacttgtttattgcagcttataatggttacaaataaagcaatagcatcacaaatttcacaaataaagcatttttttcactgcattctagttgtggtttgtccaaactcatcaatgtatcttaaggcgtaaattgtaagcgttaatattttgttaaaattcgcgttaaatttttgttaaatcagctcattttttaaccaataggccgaaatcggcaaaatcccttataaatcaaaagaatagaccgagatagggttgagtgttgttccagtttggaacaagagtccactattaaagaacgtggactccaacgtcaaagggcgaaaaaccgtctatcagggcgatggcccactacgtgaaccatcaccctaatcaagttttttggggtcgaggtgccgtaaagcactaaatcggaaccctaaagggagcccccgatttagagcttgacggggaaagccggcgaacgtggcgagaaaggaagggaagaaagcgaaaggagcgggcgctagggcgctggcaagtgtagcggtcacgctgcgcgtaaccaccacacccgccgcgcttaatgcgccgctacagggcgcgtcaggtggcacttttcggggaaatgtgcgcggaacccctatttgtttatttttctaaatacattcaaatatgtatccgctcatgagacaataaccctgataaatgcttcaataatattgaaaaaggaagagtcctgaggcggaaagaaccagctgtggaatgtgtgtcagttagggtgtggaaagtccccaggctccccagcaggcagaagtatgcaaagcatgcatctcaattagtcagcaaccaggtgtggaaagtccccaggctccccagcaggcagaagtatgcaaagcatgcatctcaattagtcagcaaccatagtcccgcccctaactccgcccatcccgcccctaactccgcccagttccgcccattctccgccccatggctgactaattttttttatttatgcagaggccgaggccgcctcggcctctgagctattccagaagtagtgaggaggcttttttggaggcctaggcttttgcaaagatcgatcaagagacaggatgaggatcgtttcgcatgattgaacaagatggattgcacgcaggttctccggccgcttgggtggagaggctattcggctatgactgggcacaacagacaatcggctgctctgatgccgccgtgttccggctgtcagcgcaggggcgcccggttctttttgtcaagaccgacctgtccggtgccctgaatgaactgcaagacgaggcagcgcggctatcgtggctggccacgacgggcgttccttgcgcagctgtgctcgacgttgtcactgaagcgggaagggactggctgctattgggcgaagtgccggggcaggatctcctgtcatctcaccttgctcctgccgagaaagtatccatcatggctgatgcaatgcggcggctgcatacgcttgatccggctacctgcccattcgaccaccaagcgaaacatcgcatcgagcgagcacgtactcggatggaagccggtcttgtcgatcaggatgatctggacgaagagcatcaggggctcgcgccagccgaactgttcgccaggctcaaggcgagcatgcccgacggcgaggatctcgtcgtgacccatggcgatgcctgcttgccgaatatcatggtggaaaatggccgcttttctggattcatcgactgtggccggctgggtgtggcggaccgctatcaggacatagcgttggctacccgtgatattgctgaagagcttggcggcgaatgggctgaccgcttcctcgtgctttacggtatcgccgctcccgattcgcagcgcatcgccttctatcgccttcttgacgagttcttctgagcgggactctggggttcgaaatgaccgaccaagcgacgcccaacctgccatcacgagatttcgattccaccgccgccttctatgaaaggttgggcttcggaatcgttttccgggacgccggctggatgatcctccagcgcggggatctcatgctggagttcttcgcccaccctagggggaggctaactgaaacacggaaggagacaataccggaaggaacccgcgctatgacggcaataaaaagacagaataaaacgcacggtgttgggtcgtttgttcataaacgcggggttcggtcccagggctggcactctgtcgataccccaccgagaccccattggggccaatacgcccgcgtttcttccttttccccaccccaccccccaagttcgggtgaaggcccagggctcgcagccaacgtcggggcggcaggccctgccatagcctcaggttactcatatatactttagattgatttaaaacttcatttttaatttaaaaggatctaggtgaagatcctttttgataatctcatgaccaaaatcccttaacgtgagttttcgttccactgagcgtcagaccccgtagaaaagatcaaaggatcttcttgagatcctttttttctgcgcgtaatctgctgcttgcaaacaaaaaaaccaccgctaccagcggtggtttgtttgccggatcaagagctaccaactctttttccgaaggtaactggcttcagcagagcgcagataccaaatactgttcttctagtgtagccgtagttaggccaccacttcaagaactctgtagcaccgcctacatacctcgctctgctaatcctgttaccagtggctgctgccagtggcgataagtcgtgtcttaccgggttggactcaagacgatagttaccggataaggcgcagcggtcgggctgaacggggggttcgtgcacacagcccagcttggagcgaacgacctacaccgaactgagatacctacagcgtgagctatgagaaagcgccacgcttcccgaagggagaaaggcggacaggtatccggtaagcggcagggtcggaacaggagagcgcacgagggagcttccagggggaaacgcctggtatctttatagtcctgtcgggtttcgccacctctgacttgagcgtcgatttttgtgatgctcgtcaggggggcggagcctatggaaaaacgccagcaacgcggcctttttacggttcctggccttttgctggccttttgctcacatgttctttcctgcgttatcccctgattctgtggataaccgtattaccgccatgcattagttattaatagtaatcaattacggggtcattagttcatagcccatatatggagttccgcgttacataacttacggtaaatggcccgcctggctgaccgcccaacgacccccgcccattgacgtcaataatgacgtatgttcccatagtaacgccaatagggactttccattgacgtcaatgggtggagtatttacggtaaactgcccacttggcagtacatcaa

SEQ ID NO: 85 - DNA, 6538 bp, Artificial Sequence
  Synthetic
gtgtatcatatgccaagtacgccccctattgacgtcaatgacggtaaatggcccgcctggcattatgcccagtacatgaccttatgggactttcctacttggcagtacatctacgtattagtcatcgctattaccatggtgatgcggttttggcagtacatcaatgggcgtggatagcggtttgactcacggggatttccaagtctccaccccattgacgtcaatgggagtttgttttggcaccaaaatcaacgggactttccaaaatgtcgtaacaactccgccccattgacgcaaatgggcggtaggcgtgtacggtgggaggtctatataagcagagctggtttagtgaaccgtcagatccgctagcgctaccggactcagatctcgagctcatgggagactggaatcttcttggaggcatactggaggaagttcactcacattctacgattgtaggaaaaatttggctcaccattctcttcatctttcggatgctggtactgagggtggctgccgaggacgtttgggacgatgaacaaagtgcctttgcctgtaacacccggcaacctggatgtaacaatatctgttacgatgacgcattccctatttccttgatccggttctgggtcctgcaaatcatatttgtatcctccccatcccttgtctacatggggcacgcgttgtaccgattgcgcgcgttcgaaaaggatcggcaacggaaaaagagccacctccgagcgcagatggagaaccccgacttggatcttgaggaacaacagaggatagatcgggaactccgccgcctcgaggagcaaaaaagaattcataaggtgcctttgaaagggtgcctgctcaggacttacgttcttcacatccttactaggagtgtcttggaggtgggattcatgatcggtcaatatatcctgtatggattccagatgcacccattgtataagtgcacgcaacccccttgtcccaacgccgtagattgctttgtttcccggccaactgagaagacgatatttatgcttttcatgcactcaatcgcagccatatctcttctccttaatattctcgaaattttccacttgggaattcggaaaattatgagaactctctacaaaaagtcttccagcgaaggcattgaagacgagacgggcccaccgtttcatctgaaaaaatactccgtcgctcagcaatgtatgatctgctcttctctccctgagagaatctcacctttgcaagctaataatcagcaacaggtaatccgagtgaatgtaccgaagtccaaaaccatgtggcaaataccccagccgcgacagcttgaggttgacccgtcaaacggtaaaaaagattggagtgagaaggaccagcactcagggcagctgcacgtccatagcccctgtccgtgggccggttccgccgggaatcagcacctgggccaacagagcgaccacagcagttttgggcttcaaaacacaatgagccaatcctggctcggtactacaacggcgccgcgaaattgtccatcttttgcggtcggaacctgggaacaaagccaagaccccgagcccagcggcgaacccctgacggaccttcattcccattgcagagactctgagggaagcatgagggaaagcggggtatggattgatcgctcccgcccaggaagccgaaaagcatcctttttgagtaggcttcttagcgaaaaaaggcatctgcattctgacagtggtagcagtggatcaagaaacagctcatgtctcgatttcccccactgggaaaattcaccttccccgctgccttcagtaacaggacaccggacaagcatggtcaggcaagcggctttgccaatcatggaactgtctcaggaattgtttcactccggttgttttttgtttcccttctttcttccgggcgtgtgcatgtacgtgtgtgtagaccgggaggctgacggcgggggagattatctgtggcgcgacaaaatcattcactcaatacactcagtcaaatttaatagcgatccaccggtcgccaccatggcgcgtaaggtcgatctcacctcctgcgatcgcgagccgatccacatccccggcagcattcagccgtgcggctgcctgctagcctgcgacgcgcaggcggtgcggatcacgcgcattacggaaaatgccggcgcgttctttggacgcgaaactccgcgggtcggtgagctactcgccgattacttcggcgagaccgaagcccatgcgctgcgcaacgcactggcgcagtcctccgatccaaagcgaccggcgctgatcttcggttggcgcgacggcctgaccggccgcaccttcgacatctcactgcatcgccatgacggtacatcgatcatcgagttcgagcctgcggcggccgaacaggccgacaatccgctgcggctgacgcggcagatcatcgcgcgcaccaaagaactgaagtcgctcgaagagatggccgcacgggtgccgcgctatctgcaggcgatgctcggctatcaccgcgtgatgttgtaccgcttcgcggacgacggctccgggatggtgatcggcgaggcgaagcgcagcgacctcgagagctttctcggtcagcactttccggcgtcgctggtcccgcagcaggcgcggctactgtacttgaagaacgcgatccgcgtggtctcggattcgcgcggcatcagcagccggatcgtgcccgagcacgacgcctccggcgccgcgctcgatctgtcgttcgcgcacctgcgcagcatctcgccctgccatctcgaatttctgcggaacatgggcgtcagcgcctcgatgtcgctgtcgatcatcattgacggcacgctatggggattgatcatctgtcatcattacgagccgcgtgccgtgccgatggcgcagcgcgtcgcggccgaaatgttcgccgacttcttatcgctgcacttcaccgccgcccaccaccaacgctaagcggccgcgactctagatcataatcagccataccacatttgtagaggttttacttgctttaaaaaacctcccacacctccccctgaacctgaaacataaaatgaatgcaattgttgttgttaacttgtttattgcagcttataatggttacaaataaagcaatagcatcacaaatttcacaaataaagcatttttttcactgcattctagttgtggtttgtccaaactcatcaatgtatcttaaggcgtaaattgtaagcgttaatattttgttaaaattcgcgttaaatttttgttaaatcagctcattttttaaccaataggccgaaatcggcaaaatcccttataaatcaaaagaatagaccgagatagggttgagtgttgttccagtttggaacaagagtccactattaaagaacgtggactccaacgtcaaagggcgaaaaaccgtctatcagggcgatggcccactacgtgaaccatcaccctaatcaagttttttggggtcgaggtgccgtaaagcactaaatcggaaccctaaagggagcccccgatttagagcttgacggggaaagccggcgaacgtggcgagaaaggaagggaagaaagcgaaaggagcgggcgctagggcgctggcaagtgtagcggtcacgctgcgcgtaaccaccacacccgccgcgcttaatgcgccgctacagggcgcgtcaggtggcacttttcggggaaatgtgcgcggaacccctatttgtttatttttctaaatacattcaaatatgtatccgctcatgagacaataaccctgataaatgcttcaataatattgaaaaaggaagagtcctgaggcggaaagaaccagctgtggaatgtgtgtcagttagggtgtggaaagtccccaggctccccagcaggcagaagtatgcaaagcatgcatctcaattagtcagcaaccaggtgtggaaagtccccaggctccccagcaggcagaagtatgcaaagcatgcatctcaattagtcagcaaccatagtcccgcccctaactccgcccatcccgcccctaactccgcccagttccgcccattctccgccccatggctgactaattttttttatttatgcagaggccgaggccgcctcggcctctgagctattccagaagtagtgaggaggcttttttggaggcctaggcttttgcaaagatcgatcaagagacaggatgaggatcgtttcgcatgattgaacaagatggattgcacgcaggttctccggccgcttgggtggagaggctattcggctatgactgggcacaacagacaatcggctgctctgatgccgccgtgttccggctgtcagcgcaggggcgcccggttctttttgtcaagaccgacctgtccggtgccctgaatgaactgcaagacgaggcagcgcggctatcgtggctggccacgacgggcgttccttgcgcagctgtgctcgacgttgtcactgaagcgggaagggactggctgctattgggcgaagtgccggggcaggatctcctgtcatctcaccttgctcctgccgagaaagtatccatcatggctgatgcaatgcggcggctgcatacgcttgatccggctacctgcccattcgaccaccaagcgaaacatcgcatcgagcgagcacgtactcggatggaagccggtcttgtcgatcaggatgatctggacgaagagcatcaggggctcgcgccagccgaactgttcgccaggctcaaggcgagcatgcccgacggcgaggatctcgtcgtgacccatggcgatgcctgcttgccgaatatcatggtggaaaatggccgcttttctggattcatcgactgtggccggctgggtgtggcggaccgctatcaggacatagcgttggctacccgtgatattgctgaagagcttggcggcgaatgggctgaccgcttcctcgtgctttacggtatcgccgctcccgattcgcagcgcatcgccttctatcgccttcttgacgagttcttctgagcgggactctggggttcgaaatgaccgaccaagcgacgcccaacctgccatcacgagatttcgattccaccgccgccttctatgaaaggttgggcttcggaatcgttttccgggacgccggctggatgatcctccagcgcggggatctcatgctggagttcttcgcccaccctagggggaggctaactgaaacacggaaggagacaataccggaaggaacccgcgctatgacggcaataaaaagacagaataaaacgcacggtgttgggtcgtttgttcataaacgcggggttcggtcccagggctggcactctgtcgataccccaccgagaccccattggggccaatacgcccgcgtttcttccttttccccaccccaccccccaagttcgggtgaaggcccagggctcgcagccaacgtcggggcggcaggccctgccatagcctcaggttactcatatatactttagattgatttaaaacttcatttttaatttaaaaggatctaggtgaagatcctttttgataatctcatgaccaaaatcccttaacgtgagttttcgttccactgagcgtcagaccccgtagaaaagatcaaaggatcttcttgagatcctttttttctgcgcgtaatctgctgcttgcaaacaaaaaaaccaccgctaccagcggtggtttgtttgccggatcaagagctaccaactctttttccgaaggtaactggcttcagcagagcgcagataccaaatactgttcttctagtgtagccgtagttaggccaccacttcaagaactctgtagcaccgcctacatacctcgctctgctaatcctgttaccagtggctgctgccagtggcgataagtcgtgtcttaccgggttggactcaagacgatagttaccggataaggcgcagcggtcgggctgaacggggggttcgtgcacacagcccagcttggagcgaacgacctacaccgaactgagatacctacagcgtgagctatgagaaagcgccacgcttcccgaagggagaaaggcggacaggtatccggtaagcggcagggtcggaacaggagagcgcacgagggagcttccagggggaaacgcctggtatctttatagtcctgtcgggtttcgccacctctgacttgagcgtcgatttttgtgatgctcgtcaggggggcggagcctatggaaaaacgccagcaacgcggcctttttacggttcctggccttttgctggccttttgctcacatgttctttcctgcgttatcccctgattctgtggataaccgtattaccgccatgcattagttattaatagtaatcaattacggggtcattagttcatagcccatatatggagttccgcgttacataacttacggtaaatggcccgcctggctgaccgcccaacgacccccgcccattgacgtcaataatgacgtatgttcccatagtaacgccaatagggactttccattgacgtcaatgggtggagtatttacggtaaactgcccacttggcagtacatcaa

SEQ ID NO: 86 - DNA, 5827 bp, Artificial Sequence
  Synthetic
catgcattagttattaatagtaatcaattacggggtcattagttcatagcccatatatggagttccgcgttacataacttacggtaaatggcccgcctggctgaccgcccaacgacccccgcccattgacgtcaataatgacgtatgttcccatagtaacgccaatagggactttccattgacgtcaatgggtggagtatttacggtaaactgcccacttggcagtacatcaagtgtatcatatgccaagtacgccccctattgacgtcaatgacggtaaatggcccgcctggcattatgcccagtacatgaccttatgggactttcctacttggcagtacatctacgtattagtcatcgctattaccatggtgatgcggttttggcagtacatcaatgggcgtggatagcggtttgactcacggggatttccaagtctccaccccattgacgtcaatgggagtttgttttggcaccaaaatcaacgggactttccaaaatgtcgtaacaactccgccccattgacgcaaatgggcggtaggcgtgtacggtgggaggtctatataagcagagctggtttagtgaaccgtcagatccgctagcgctaccggactcagatctcgagatgggggattggtcagctcttggaaagctccttgacaaagtacaggcgtacagtactgccggaggaaaagtgtggctcagtgtactgtttatattccggattctgcttctcggcacagccgtggagagcgcatggggtgacgaacaaagcgcgttccggtgcaacacccaacaacctggatgtgaaaacgtttgttacgataagtcattccctatctcccacgtaaggttctgggtgttgcagataatcttcgtttctgtacccacccttctttatcttgcccatgtgttttacgtaatgagaaaggaggagaaacttaataagaaagaggaggaattgaaagtcgcgcaaacggatggcgttaatgtggatatgcatctgaagcaaatagagataaagaaattcaaatatggtattgaagaacatggaaaagtaaaaatgagaggtggtttgcttcggacgtatattatctccatactttttaaaagcatatttgaggtagccttcttgctgatacagtggtatatatacggcttttcattgagtgctgtgtacacatgcaagcgcgatccatgcccccatcaagtagattgtttcttgagcagaccgacagaaaaaactatcttcatcatttttatgctggtggtatccctggtttccctggcactcaacataatagaactcttctatgtgttcttcaagggggttaaggacagggtgaaaggtaagtccgacccatatcatgcgacctctggagcgctgtcccctgcaaaggactgtggaagccagaagtacgcctattttaatggatgttccagtcctacagcccctctgagccctatgtctccacccggatataaactggtgaccggtgatcgcaacaattcaagttgcaggaactataataagcaggcttccgaacagaattgggccaattacagtgccgaacaaaaccgaatgggacaagcgggatctaccatttctaattcacacgctcaaccgtttgacttccctgatgacaatcagaacagtaaaaagctcgcggctggccacgaactgcaaccgcttgcgatagtagaccaaagaccgagcagtcgagcgtcttccagagcaagctctcgcccacggccagacgatctggaaatagatccaccggtcgccaccatggtgagcaagggcgaggagaataacatggccatcatcaaggagttcatgcgcttcaaggtgcacatggagggctccgtgaacggccacgagttcgagatcgagggcgagggcgagggccgcccctacgaggcctttcagaccgctaagctgaaggtgaccaagggtggccccctgcccttcgcctgggacatcctgtcccctcagttcatgtacggctccaaggtctacattaagcacccagccgacatccccgactacttcaagctgtccttccccgagggcttcaggtgggagcgcgtgatgaacttcgaggacggcggcattattcacgttaaccaggactcctccctgcaggacggcgtgttcatctacaaggtgaagctgcgcggcaccaacttcccctccgacggccccgtaatgcagaagaagaccatgggctgggaggcctccgaggagcggatgtaccccgaggacggcgccctgaagagcgagatcaagaagaggctgaagctgaaggacggcggccactacgccgccgaggtcaagaccacctacaaggccaagaagcccgtgcagctgcccggcgcctacatcgtcgacatcaagttggacatcgtgtcccacaacgaggactacaccatcgtggaacagtacgaacgcgccgagggccgccactccaccggcggcatggacgagctgtacaagtaagcggccgcgactctagatcataatcagccataccacatttgtagaggttttacttgctttaaaaaacctcccacacctccccctgaacctgaaacataaaatgaatgcaattgttgttgttaacttgtttattgcagcttataatggttacaaataaagcaatagcatcacaaatttcacaaataaagcatttttttcactgcattctagttgtggtttgtccaaactcatcaatgtatcttaaggcgtaaattgtaagcgttaatattttgttaaaattcgcgttaaatttttgttaaatcagctcattttttaaccaataggccgaaatcggcaaaatcccttataaatcaaaagaatagaccgagatagggttgagtgttgttccagtttggaacaagagtccactattaaagaacgtggactccaacgtcaaagggcgaaaaaccgtctatcagggcgatggcccactacgtgaaccatcaccctaatcaagttttttggggtcgaggtgccgtaaagcactaaatcggaaccctaaagggagcccccgatttagagcttgacggggaaagccggcgaacgtggcgagaaaggaagggaagaaagcgaaaggagcgggcgctagggcgctggcaagtgtagcggtcacgctgcgcgtaaccaccacacccgccgcgcttaatgcgccgctacagggcgcgtcaggtggcacttttcggggaaatgtgcgcggaacccctatttgtttatttttctaaatacattcaaatatgtatccgctcatgagacaataaccctgataaatgcttcaataatattgaaaaaggaagagtcctgaggcggaaagaaccagctgtggaatgtgtgtcagttagggtgtggaaagtccccaggctccccagcaggcagaagtatgcaaagcatgcatctcaattagtcagcaaccaggtgtggaaagtccccaggctccccagcaggcagaagtatgcaaagcatgcatctcaattagtcagcaaccatagtcccgcccctaactccgcccatcccgcccctaactccgcccagttccgcccattctccgccccatggctgactaattttttttatttatgcagaggccgaggccgcctcggcctctgagctattccagaagtagtgaggaggcttttttggaggcctaggcttttgcaaagatcgatcaagagacaggatgaggatcgtttcgcatgattgaacaagatggattgcacgcaggttctccggccgcttgggtggagaggctattcggctatgactgggcacaacagacaatcggctgctctgatgccgccgtgttccggctgtcagcgcaggggcgcccggttctttttgtcaagaccgacctgtccggtgccctgaatgaactgcaagacgaggcagcgcggctatcgtggctggccacgacgggcgttccttgcgcagctgtgctcgacgttgtcactgaagcgggaagggactggctgctattgggcgaagtgccggggcaggatctcctgtcatctcaccttgctcctgccgagaaagtatccatcatggctgatgcaatgcggcggctgcatacgcttgatccggctacctgcccattcgaccaccaagcgaaacatcgcatcgagcgagcacgtactcggatggaagccggtcttgtcgatcaggatgatctggacgaagagcatcaggggctcgcgccagccgaactgttcgccaggctcaaggcgagcatgcccgacggcgaggatctcgtcgtgacccatggcgatgcctgcttgccgaatatcatggtggaaaatggccgcttttctggattcatcgactgtggccggctgggtgtggcggaccgctatcaggacatagcgttggctacccgtgatattgctgaagagcttggcggcgaatgggctgaccgcttcctcgtgctttacggtatcgccgctcccgattcgcagcgcatcgccttctatcgccttcttgacgagttcttctgagcgggactctggggttcgaaatgaccgaccaagcgacgcccaacctgccatcacgagatttcgattccaccgccgccttctatgaaaggttgggcttcggaatcgttttccgggacgccggctggatgatcctccagcgcggggatctcatgctggagttcttcgcccaccctagggggaggctaactgaaacacggaaggagacaataccggaaggaacccgcgctatgacggcaataaaaagacagaataaaacgcacggtgttgggtcgtttgttcataaacgcggggttcggtcccagggctggcactctgtcgataccccaccgagaccccattggggccaatacgcccgcgtttcttccttttccccaccccaccccccaagttcgggtgaaggcccagggctcgcagccaacgtcggggcggcaggccctgccatagcctcaggttactcatatatactttagattgatttaaaacttcatttttaatttaaaaggatctaggtgaagatcctttttgataatctcatgaccaaaatcccttaacgtgagttttcgttccactgagcgtcagaccccgtagaaaagatcaaaggatcttcttgagatcctttttttctgcgcgtaatctgctgcttgcaaacaaaaaaaccaccgctaccagcggtggtttgtttgccggatcaagagctaccaactctttttccgaaggtaactggcttcagcagagcgcagataccaaatactgttcttctagtgtagccgtagttaggccaccacttcaagaactctgtagcaccgcctacatacctcgctctgctaatcctgttaccagtggctgctgccagtggcgataagtcgtgtcttaccgggttggactcaagacgatagttaccggataaggcgcagcggtcgggctgaacggggggttcgtgcacacagcccagcttggagcgaacgacctacaccgaactgagatacctacagcgtgagctatgagaaagcgccacgcttcccgaagggagaaaggcggacaggtatccggtaagcggcagggtcggaacaggagagcgcacgagggagcttccagggggaaacgcctggtatctttatagtcctgtcgggtttcgccacctctgacttgagcgtcgatttttgtgatgctcgtcaggggggcggagcctatggaaaaacgccagcaacgcggcctttttacggttcctggccttttgctggccttttgctcacatgttctttcctgcgttatcccctgattctgtggataaccgtattaccgc

SEQ ID NO: 87 - DNA, 35 bp, Artificial Sequence
  Synthetic
caaagtacaggcgtaccctactgccggaggaaaag

SEQ ID NO: 88 - DNA, 35 bp, Artificial Sequence
  Synthetic
cttttcctccggcagtagggtacgcctgtactttg

SEQ ID NO: 89 - DNA, 31 bp, Artificial Sequence
  Synthetic
gcttctcggcacagttgtggagagcgcatgg

SEQ ID NO: 90 - DNA, 31 bp, Artificial Sequence
  Synthetic
ccatgcgctctccacaactgtgccgagaagc

SEQ ID NO: 91 - DNA, 31 bp, Artificial Sequence
  Synthetic
gcgcgttccggtgcgacacccaacaacctgg

SEQ ID NO: 92 - DNA, 31 bp, Artificial Sequence
  Synthetic
ccaggttgttgggtgtcgcaccggaacgcgc

SEQ ID NO: 93 - DNA, 34 bp, Artificial Sequence
  Synthetic
cggtgcaacacccaacatcctggatgtgaaaacg

SEQ ID NO: 94 - DNA, 34 bp, Artificial Sequence
  Synthetic
cgttttcacatccaggatgttgggtgttgcaccg

SEQ ID NO: 95 - DNA, 38 bp, Artificial Sequence
  Synthetic
cggtgcaacacccaacaagctggatgtgaaaacgtttg

SEQ ID NO: 96 - DNA, 38 bp, Artificial Sequence
  Synthetic
caaacgttttcacatccagcttgttgggtgttgcaccg

SEQ ID NO: 97 - DNA, 35 bp, Artificial Sequence
  Synthetic
cgtttgttacgataagtatttccctatctcccacg

SEQ ID NO: 98 - DNA, 35 bp, Artificial Sequence
  Synthetic
cgtgggagatagggaaatacttatcgtaacaaacg

SEQ ID NO: 99 - DNA, 43 bp, Artificial Sequence
  Synthetic
cgtttgttacgataagtcagcccctatctcccacgtaaggttc

SEQ ID NO: 100 - DNA, 43 bp, Artificial Sequence
  Synthetic
gaaccttacgtgggagataggggctgacttatcgtaacaaacg

SEQ ID NO: 101 - DNA, 31 bp, Artificial Sequence
  Synthetic
gcatctgaagcaaacagagataaagaaattc

SEQ ID NO: 102 - DNA, 31 bp, Artificial Sequence
  Synthetic
gaatttctttatctctgtttgcttcagatgc

SEQ ID NO: 103 - DNA, 26 bp, Artificial Sequence
  Synthetic
tatatacggcgcttcattgagtgctg

SEQ ID NO: 104 - DNA, 18 bp, Artificial Sequence
  Synthetic
taccactgtatcagcaag

SEQ ID NO: 105 - DNA, 28 bp, Artificial Sequence
  Synthetic
cttttcattggctgctgtgtacacatgc

SEQ ID NO: 106 - DNA, 21 bp, Artificial Sequence
  Synthetic
ccgtatatataccactgtatc

SEQ ID NO: 107 - DNA, 21 bp, Artificial Sequence
  Synthetic
ttgagtgctgcgtacacatgc

SEQ ID NO: 108 - DNA, 20 bp, Artificial Sequence
  Synthetic
tgaaaagccgtatatatacc

SEQ ID NO: 109 - DNA, 21 bp, Artificial Sequence
  Synthetic
tgcaagcgcgctccatgcccc

SEQ ID NO: 110 - DNA, 27 bp, Artificial Sequence
  Synthetic
tgtgtacacagcactcaatgaaaagcc

SEQ ID NO: 111 - DNA, 32 bp, Artificial Sequence
  Synthetic
gcgatccatgcccccctcaagtagattgtttc

SEQ ID NO: 112 - DNA, 32 bp, Artificial Sequence
  Synthetic
gaaacaatctacttgaggggggcatggatcgc

SEQ ID NO: 113 - DNA, 39 bp, Artificial Sequence
  Synthetic
gtagattgtttcttgagccatccgacagaaaaaactatc

SEQ ID NO: 114 - DNA, 39 bp, Artificial Sequence
  Synthetic
gatagttttttctgtcggatggctcaagaaacaatctac

SEQ ID NO: 115 - DNA, 31 bp, Artificial Sequence
  Synthetic
catttttatgctggtgctatccctggtttcc

SEQ ID NO: 116 - DNA, 31 bp, Artificial Sequence
  Synthetic
ggaaaccagggatagcaccagcataaaaatg

What is claimed is:

1. An isolated nucleic acid molecule, comprising: a nucleic acid sequence encoding a connexin protein and a nucleic acid sequence encoding a carboxy-terminal fluorescent label.

2. The isolated nucleic acid molecule of claim 1, wherein the encoded connexin protein comprises the sequence set forth in any one of SEQ ID NO:01-SEQ ID NO:21, or a fragment thereof.

3. The isolated nucleic acid molecule of claim 1, wherein the nucleic acid sequence can comprise the sequence set forth in any one of SEQ ID NO:22-SEQ ID NO:42, or a fragment thereof.

4. The isolated nucleic acid molecule of claim 1, wherein the nucleic acid sequence encoding a connexin protein is codon-optimized for expression in a human cell.

5. A method of evaluating gap junction formation, the method comprising: performing flow enabled tracking of connexosomes in HEK 293T cells (FETCH).

6. The method of claim 5, wherein performing FETCH comprises (i) generating fluorescent connexosomes, and (ii) using flow cytometry to track the fluorescent connexosomes in the one or more cell samples.

7. The method of claim 6, wherein generating one or more fluorescent connexosomes comprises transfecting a first population of cells with a first fluorescently-labeled, C-terminally fused connexin construct; and transfecting a second population of cells with a second fluorescently-labeled, C-terminally fused connexin construct.

8. The method of claim 7, wherein the first fluorescently-labeled, C-terminally fused connexin construct and the second fluorescently-labeled, C-terminally fused connexin comprise the isolated nucleic acid molecule of any one of claims 1-4.

9. The method of claim 7, further comprising incubating the transfected first and second populations of cells.

10. The method of claim 9, further comprising trypsinizing the incubated and transfected first and second populations of cells.

11. The method of claim 10, further comprising incubating the trypsinized first population of cells with the trypsinized second population of cells.

12. The method of claim 11, wherein incubating the combined populations of cells continues to hyperdensity and/or over-confluency.

13. The method of claim 12, further comprising trypsinizing the incubated combined population of cells, resuspending the trypsinized cells, and fixing the resuspended cells.

14. The method of claim 13, wherein, during flow cytometry, the cells are analyzed in two selection gates prior to fluorescence evaluation.

15. The method of claim 14, wherein analyzing the cells in two selection gates comprises (i) identifying cells by evaluating sample forward vs. side scatter area; and (ii) identifying single cells by evaluating cells that maintained a linear correlation of forward scatter height to forward scatter area.

16. The method of claim 14, wherein the flow cytometry generates a fluorescent profile for each cell sample.

17. The method of claim 16, wherein the fluorescence profile comprises 4 quadrants, wherein the 4 quadrants comprise Q1, Q2, Q3, and Q4.

18. The method of claim 17, further comprising establishing a FETCH score.

19. The method of claim 18, wherein the FETCH score comprises the proportion of dual colored-cells compared to fluorescent cells.

20. The method of claim 19, wherein the proportion comprises Q2/(Q1+Q2+Q3).

21. The method of claim 20, further comprising quantifying the fluorescence exchange between cells mediated by connexosomes.

22. The method of claim 20, further comprising confirming the relationship between the fluorescence exchange phenotype and the connexosome formation.

23. The method of claim 22, wherein the confirming the relationship between the fluorescence exchange phenotype and connexosome formation comprises using fluorescence-activated cell sorting (FACS) to collect cells from Q2 for microscopy analysis.

24. The method of claim 23, wherein FACS confirms the formation of dual-labeled connexosomes.

25. The method of claim 18, wherein the method identifies homotypic docking of hemichannels and/or heterotypic docking of hemichannels.

26. The method of claim 11, further comprising performing whole-cell, dual-patch clamp analysis on the combined populations of cells.

27. The method of claim 18, wherein the FETCH score reflects variation in (i) the expression level of the connexin constructs, (ii) the trafficking of the connexin constructs, (iii) the stability of the connexin constructs, and/or (iv) the turnover rate of the connexin constructs.
